United States Patent Application Publication US 2022/0211063 A1 - sequence listing, part 21

SEQ ID NO: 56 - DNA, 7752691 bp, Penicillium roqueforti (residues 1,938,174-3,876,346 of 7,752,691)
  misc_feature (471)..(2988): n is a, c, g, or t
  misc_feature (125072)..(125245): n is a, c, g, or t
  misc_feature (177056)..(177831): n is a, c, g, or t
  misc_feature (384173)..(384363): n is a, c, g, or t
  misc_feature (555910)..(555935): n is a, c, g, or t
  misc_feature (601324)..(601424): n is a, c, g, or t
  misc_feature (676814)..(677158): n is a, c, g, or t
  misc_feature (719555)..(719754): n is a, c, g, or t
  misc_feature (1142719)..(1142936): n is a, c, g, or t
  misc_feature (1186267)..(1186889): n is a, c, g, or t
  misc_feature (1335750)..(1335921): n is a, c, g, or t
  misc_feature (1623850)..(1624038): n is a, c, g, or t
  misc_feature (1638010)..(1638177): n is a, c, g, or t
  misc_feature (1653190)..(1653311): n is a, c, g, or t
  misc_feature (1825514)..(1825694): n is a, c, g, or t
  misc_feature (2226312)..(2226460): n is a, c, g, or t
  misc_feature (2393310)..(2393476): n is a, c, g, or t
  misc_feature (2448029)..(2448167): n is a, c, g, or t
  misc_feature (2535304)..(2535417): n is a, c, g, or t
  misc_feature (2536977)..(2537199): n is a, c, g, or t
  misc_feature (2854098)..(2854136): n is a, c, g, or t
  misc_feature (2984508)..(2984757): n is a, c, g, or t
  misc_feature (3020810)..(3020969): n is a, c, g, or t
  misc_feature (3033643)..(3034020): n is a, c, g, or t
  misc_feature (3159237)..(3159358): n is a, c, g, or t
  misc_feature (3215468)..(3215733): n is a, c, g, or t
  misc_feature (3224528)..(3224830): n is a, c, g, or t
  misc_feature (3317372)..(3317652): n is a, c, g, or t
  misc_feature (3542053)..(3542228): n is a, c, g, or t
  misc_feature (3623060)..(3671559): n is a, c, g, or t
  misc_feature (3674099)..(3676135): n is a, c, g, or t
  misc_feature (3690909)..(3691143): n is a, c, g, or t
  misc_feature (3731654)..(3731912): n is a, c, g, or t
  misc_feature (3988980)..(3989155): n is a, c, g, or t
  misc_feature (3991939)..(3992050): n is a, c, g, or t
  misc_feature (4101299)..(4101736): n is a, c, g, or t
  misc_feature (4338887)..(4339016): n is a, c, g, or t
  misc_feature (4339394)..(4339698): n is a, c, g, or t
  misc_feature (4384061)..(4384223): n is a, c, g, or t
  misc_feature (4533678)..(4533904): n is a, c, g, or t
  misc_feature (4697041)..(4697211): n is a, c, g, or t
  misc_feature (4793826)..(4796541): n is a, c, g, or t
  misc_feature (4802143)..(4802515): n is a, c, g, or t
  misc_feature (5082574)..(5082717): n is a, c, g, or t
  misc_feature (5096756)..(5096912): n is a, c, g, or t
  misc_feature (5239501)..(5239639): n is a, c, g, or t
  misc_feature (5277854)..(5278038): n is a, c, g, or t
  misc_feature (5381189)..(5381388): n is a, c, g, or t
  misc_feature (5479369)..(5479800): n is a, c, g, or t
  misc_feature (5512360)..(5512556): n is a, c, g, or t
  misc_feature (5631285)..(5631372): n is a, c, g, or t
  misc_feature (5721770)..(5721994): n is a, c, g, or t
  misc_feature (5728887)..(5729032): n is a, c, g, or t
  misc_feature (5774080)..(5774169): n is a, c, g, or t
  misc_feature (5808546)..(5808590): n is a, c, g, or t
  misc_feature (5833022)..(5833139): n is a, c, g, or t
  misc_feature (5846579)..(5846770): n is a, c, g, or t
  misc_feature (5859707)..(5864428): n is a, c, g, or t
  misc_feature (5865409)..(5948408): n is a, c, g, or t
  misc_feature (5948989)..(5949423): n is a, c, g, or t
  misc_feature (6008477)..(6008565): n is a, c, g, or t
  misc_feature (6324500)..(6325221): n is a, c, g, or t
  misc_feature (6373350)..(6373710): n is a, c, g, or t
  misc_feature (6805689)..(6805691): n is a, c, g, or t
  misc_feature (6847122)..(6848137): n is a, c, g, or t
  misc_feature (6999671)..(6999803): n is a, c, g, or t
  misc_feature (7043433)..(7047240): n is a, c, g, or t
  misc_feature (7056977)..(7057482): n is a, c, g, or t
  misc_feature (7108384)..(7109155): n is a, c, g, or t
  misc_feature (7114292)..(7114980): n is a, c, g, or t
  misc_feature (7152070)..(7152265): n is a, c, g, or t
  misc_feature (7347420)..(7347526): n is a, c, g, or t
  misc_feature (7355683)..(7355687): n is a, c, g, or t
  misc_feature (7379165)..(7379439): n is a, c, g, or t
  misc_feature (7441586)..(7441811): n is a, c, g, or t
  misc_feature (7524935)..(7525054): n is a, c, g, or t
  misc_feature (7750548)..(7752461): n is a, c, g, or t
tatacaaggacgaagaaaccacccgcctccgagtctccattcccctgtctgaagtgaccgctgtcgcgcccgtcaagtctccccgatcgacccggcggcatgttttcggtgtctttaccccatctacgaattaccgcttcgaagccctgagcgaacgcgatgcagaggactggatcgaccgcattcgtgccgagaccccccgcgacgaggacgagcgagctttcctggctttgaccaaaaagcacgatccccctgccatccagaaacagctcgtcgacgagacaaccgatcactccgacttcgatcacactggccgcgccagctctccggagccacgccatccgctgtccccacgcagtaaaaatgcccagaaactcccttacatccaggattactccggcaacgagatggcatcgcattcagagttctctgatggacctgcgccatcacgtaacatctacctacgatccatgccctccatccattcactgtccgtttcagcactggaggataaatcggcaccccggccgtcatcgtctctaccccgagataccagcaaacaaacagactcgggcactttgcgtgacccagagcgggtaatctgtcaggggtacctgcaggggctgcgcatacaaggaaccgtgcgtcagtggaaacggctctgggttgtgcttcgacctaagagtttggccttttacaaggatgaatcggagtatgctgcagtcaagatcatccccatgtctcatgtatttgatgccgcagaagtggaccctttgtcgagatcgaagacgttctgcttgcagatcatcgccgaagaaaagacctatcgactttgcgccccggatgaagagtccctggcgcgctggctgggctcattgaaaagcattctggccgcgcgcaggcgattggagccgtctatggccacttctgtataatgccactcgctctacggagtagggcttgttttattactctacctattcctactcccttccttcacctcatcttccctgcatctcaggaaccctctctcattatttcttatcttttaactcttttctttcaatatacccaggttggtgatctcgttttgactgctcgtctcgcggtgagctccggagtcttcgaataacggattggcgttagtaccttcgtgctcattgagcaccctgtttttttctaccttcatttctccaactgtctattgatttcattcattgacacgatgtattctcattgcatccatgcttctctctcactgtggcatcctcccttttccgtcgtccgtcttcttccatttcagtgtctatattgagtacctattatgtatcatattgcttcaggctgtactacgctagtgcataatatataatactctatcaggataccatcattcaagtttggtgttaaccgttcggtgtaatttttcgaatgtcacagatatggcgctaatgtatgacttatattacagagggtcaaaccaagcttttggtcggccttggctgagacccctcaattttagatgtgagaaatcaaattcgtgactctttttggagttgactagactcggcaaatcatccgtctacaattgggttacaaatttcgatttcgtggagaggtggactgaaatgcaggcagaagtagagccaatgagaatgctgaatgacgctacacataatctatatcttgggaataccaacctggagaataaactaaatgctatgtgagcaatacaagaaatgtgtagcaatgaatacaagaaccctcccatgaccaaactaacgcatttcctcttcttcaacgggaatactgttatactcacccgagaaggtcctgcctgcatcagtggtgaggtcgtcctcaggcttactctcgtgttgcacaaccaagaatgacaagaacacaatagcggctccaacccagtacagagggctggagtattgtgactgtaggaccatctgtccaatcagggagagcgggatggtcatactaagcccgactgtcacgataagcggggtggtgaggagcatggagtaagcccaagcaatgtcggagacaaatgatgcaaacgcgttggtctgatagacgtgaggttagaatcaaaggtgagcaacaggagtcggagccataccagaatgattgaccacactcgcgacgtctcgggtaaggagaagggctcaagtcccgtccagtgcatgatgaagaaaccaggccacagaaagatgatgttgaaaaatccaaccaggccgaagaagagtggcatgtttacccgggattcgtcgccaacttgtttcttcatcacgacggtataaagaccgtacaagatggcactgaacgctgccatggcatcgccaagggcaatctcccctgaggatttgtgtgggaatgaaccctcgccactatctgcgccctcgcctgtttctggcttggagagatctacgcgcgaaatcaggataatgccaatcagagaagccaagacacccattaatttgcgcatcgtgaatttctcaacacgcagcagggcgccgaagaccatagtccatacacctagaagagtgagggtgagaacctggtctttacacatctaaacgggggaatcttaccactggtggaagtcagaatggttgtgcttgcaactgacgtgaattgaagacatcccatggcgaagtaatttgcctatccaagaaatctcgattagttcccttccaacacataagcttccatatcgtgaggtgtatgacatacagtaaactatgataggttagccagctgatcatctatctaagcctcaaggtcattgtgcttacccagagcagacaaaactgaatactgagtttagctgtcgctttaagccctagctttccgcttgaaggatcctgtctcccccgcgagaattgcccgtcctcttcatctgagccgctgcgtagtatcctctcctcctcggccttcgggtcatgcgaatccaaatggttcaaaaagctcctcaacgatgtgatctgagaaagtttcccgtgacgccagagagcccatgttcgacgagcgacgatgagaatgagaggcatcataaacatggaggtattcgtgtaagttacgaagaaagggttcgggtatgttttgtcggcgaagatagtctggatgtcatttcatgggtaattagccaaatgtttgtatcaatgtatgtattttgcgttacgaggttatgatttctcaggaagggatgcgcatacacttccaaggaaattcgaggttgtccacagcacaaccaccactaggagcaggatgattcctaatgttcgccgcgccatccccagtggcatcgtgccaggtgcttcgtgtgtggtcaaggccatggttgtttaagttgttttagttgcctgtgagagggttgaatctgcgcgactcgtcgaggcgtaatactggtgaagaacctcgtgccgccgatgtcgcaatcgctacgtttgcagccgaggatgccgagttggacgggatatcagtcggaccgctgtcatctgaacatctgaagcgtaatgagcaaagatctctgtgcagaagcaaatgagtgtcacgagacttcctgcctaaatatatgcgctgaagagaacacggggttatgccaagcattcgcaagataagggtccgggtggggagaaatgtagtcgccgatattatttcggtactccgtacggagtacatttatttgtagtaattaaccacgagctacatcagcctacatgtgataaataccctgatggctatcataagaagtaacctgccctggtgactacggatcatctgatggtactagatttacttcgagggagtatgcgatcaactgcctattacggaaaaatgaaggaatcgcattaagcctaacaaagacattgtctgcataaaactgacccgagaaagggttgagtaagaagtttctctctgaggtgaatttcacaatgaaaccaagacatctacaagacaccgggggaatggcaaggtgatccaaaacaaaccccgtggtcttctttacagactcaggaccggagaccaaccaaatagtagtaggaaaaaaggaaagacagaggaaataggtcgctggaacatcatagcaattggaagggtatatcaacaggcacagccatcacggtcattgtccagatggatgttgattgggtcgctgaattcaccgctgaattcctcagcctcttcctgggcaagtgcactccgcgcgataactaaatagtgattagaaatgtcgggaaagaacagtttttgagaaaagtagctagggaatttgactcaccttcaaacgcctgctcgacgttgacagcttccttggcactggtctcgaagtagggaatgttacccttcgactggcagaaagtcatggcccgttttgaggagatcatacgcttgttctcctctacatcgatcttgttaccgataacaacctgctcatgactattagcacggaccaacatatcattttgcctgctgctgcggcgcatgagataaggaaaagaaatgcaggaacaccacttacgaatgggaaactctctgggtccctcgggcttgcctggatcaagaactcatctcgccagctgtcgagagcctcgaaactcttggagttgttcacatcataaaccaagacacagcagtcggctccacgatagaaggcgactcccaacgactggaaccgttcttggcccgcagtatcccaaatctgacacctcaaagttagttactgcccctcatcacgagattgtgctaaagtctctagcgccttacctgcattgtcacgagtcggtcgtcaacgagaacctcctttgtgaggaaatctgctccgattgtggccttgtagcttccactgaacttcttattgacctattcagctcataaaattgcatgttagcggttataggtcttcggggccgaccgcggtacggccataggctagtttgggacgagattgaacggacatattggttcatcaaacttgtttttcccacaccactgtcaccaaggataataacctagatttcaaagacgccagttagcaaaaaaaacccccacatattgaaagattcagtgcccgtcacacggatcagatgcggggattgtaccttgaggaggaccttcttccttgacgccatggttggggattggccaagtgaccaagtgtaaatgtgcgaggaataaccgtaagttcactattaagcaaagacctataagcagtcttcactaagcctttatagaacagataaggacaagttagttggagagttggggtcgggttgcagccggattcgatgatgcatgaggagagctgggcggtggagcgggcggtgggcaagtgataacgattagcacatctgactccccaagcggcaaccaactccacttcatcactttcaggtacatttgcttggaaggcttatggcccactggagggaggattacttggctgccctgacagtgcgagaccaacgagagaaagcaaatgctactctctatgatgcctgtcagtctatcattgatgctttttgttgagtgattgcgactgacatcatttaccaaatctagatgcccagcttgcagatcgcaccagcaaattagcagcagcagcaaaacttaccagtcctgcaatagcgcagagtgaagctcaacccactgtcccatctcctatagttgcaccatccaaaaggcaacgatcgactgagccagactataccccgactgatcttctcaatactacccgtgcagacctttccgaggcacagcgatcccgctcggaattacaagatcgcttgaatcgggtgaacacagaagcagaaacacttcgcaagaagagttcacaagaggctcgacgaataaacgccttggaaagcgagagggcgcatctcaagctacgattggcagacagagatgcggagctaaaagggaaagccaagctgctagaggtaggctgtttgatattcacataggctttctaatcacgcaagggtgagtgagggaaagtggctgacatacttgtgcgcatctctgcaggatttccaagatgaactggcgacgctaaaccttcagcttaatatggcagaagaacgatcaactcgacttaaaaatgaaaacaaagacctagttgatcgttggatggccagaatgggtcaagaagccgaggctatgaacgatgcatcgaagtattcctgactagtcctaatgcaccgagcaggtgacagggctaggttgctagaatagaacggagtctagctcctgcggcatttatatattgaatcatgatagccactgcaaaagcgctagatatatatggtcgtgcggctacattaagcttgctcatctttccactgaatgcctgaacagcaggtgctgcacaaagcccgcgcgtggtccatgacttactttcctataatcagtcgaaaatagctagctccctaaccacatcgcccctgtacaactccttgagagcctcgaaaagtcctgataatcccaccaagttgcatacgataagccgcatagctagtgcctatgtcccgcgataatctaatactgtcctcttagattgcctgtcaattaccaacattccattcaatattcatacaccatagcactaaatattgaggaatgagaaggctaaaccaagtatcttactaccagggcctgaacttgaaaggattattcgttttgtacagtcaggttgtcagaaaatggtatcatacaaaaataaacagggaaagtatatccaataacggacaaagtaatgtacaaaagtgccaaaaactaaatgtatgtgccatgcaaaaataccaaactagccattgaagactatggcgtatcatcaatgaaagctttcagccgagagctgtctttagtggcaatgaaatatgtaccaccaacgtcagtccagctcacgttgttcgaccagtaattcttctgctggaccttgaggagattaatcggagagttcaggttgcgagactggattttgtgaccagcgggaacgaaagacttaagtgagacaattttgcagccttctttcatatccaaaaaatggttgatcagctcattgttcagttgtggggtgaaggcctggttgttgataagcaccacgtcagcccgcttcaagacgcttatgatactctcctgctcaagaaagtcacctcggacaagatgagtttttcctggcgcaattccccacagccggcatcgagccttgaactcggattgctgcaaatctgccaaatcacatgcgtttgacatcatctcgcaaccccaactctcacagccaacttcgagtgccgcctgaagaacgacattacctacgcccgagccaagatcaacaaagacttggcccgattttagcttggtttctttgaaaattgtgctgataaagcgggggagaagctctccgtagacgttgtccgtgccgttctcgtattgccggagtgactcgacttgaggggataccgtgcgcgagtaaatttgagtgagaattctttccacccaaggtaaaccaatgccttgtttcgcatccaaatgcttcgcaagactgccgttggtccttaaccgctggatagccttattgtaatcatcgacagcttcccggaattgagtctcggatgttacagccagggcccggcgtaatcggcgcctgatccccgtcgtctcgtcgttgaactgaccagcctcctcgctcgggatgtaattatcgcagaccgtttcgatgacctgaacaatgtcgtcgatgggtcggaatccgtcactttctcgggggactacagagtcatatctggccgaacaataaattagcatatcagtgtccagagatcgatagtctaaccaaacgtacctctcctgctgcgaagcactggggtattgcaggagaatctctttgcgcttgccctcggcgccaaaggcgggcttgaacttgccggacttctgacccgacgttatatccgcggcatgtatcattttaaacgggcgagatccttcttctgagaacgccttcgccgagcggagacgccgctccgggtcgggttcggcgctggcgctagtcctcgcgcgtttgtgcacctcaaacgaggcctcgctgtcgctggcgtcatcgtcgctcgagagtcgttgttcgggtgtcggcctttttcgagtgcgcgagggagtacttaatcgttttgccgagcgtgcttccaggtcactagagaccgatcgagatttcaacgcccgcgccttccggttccgctccgccgaggactggattcgaggtgatcgagtatccgagggttgggtgactgatcgtgtaggagctgcaggtcgagtctgcacaaccttgcgaatttgcgccttctttggctgtagtgagaaggccccggcccctcctttctgaaggtggtcgaaaaagcccatatggatagggatagatagatataaacaaactaatgcagaatggaaatgatgtatgcaaagaatgcaataaaaacgagtcaaacgatataagtataatgcgagcaagaaggaagcgggagaagaaaagaaaagaagcagggcttatcgattaaggcgccactcggggaaaccacgcgatcccgcgttccttggcacttacttggcgcttttgtctatagcctcatttcttctacaggcgtctaaatggatctacatatatgttgttcaaatgttccaaggttaccatctggctatcaaaagtcagattatatatgtaaattatccgattcaaacatttgaactatgaactatggccactctctctatttcttcgactttttcttcgccagcctcttctccgcacgaacatccttcttcatacgagcatcgacaatcttgtacttgcccttgacacccttaggacggccagagataccacgattgggacctttggccactacgagcttgacttcctgcttaggcttcttcttggttgccctgctcatcaatctcgcgattgcgccagctttgtcccgctcgctgagagcatcgtcctctgccaaaagcgctgacttcttgcgcagtttctccagtctttgagccgccttgtacttcttgcgtccctgggcctccatcaccttcttgatcgggcgggcattgatggcacgcatcttttctctaatagcatccgcggcagccttggtgatgggacggacaggcctgctgtgcttgccctcgtcgtcgaggaaccattcgggaaggccgtccacgtcgcggaaagcaaatcggttgaagccatcgtcaacaatatcagtcgaccttttttctccagtagccattgcttgcgcaagggccatggcttctgcggtaatgatgtcgatgtctgtaggttgaggaataaatgttagtcctgacgttattcatgtccagcatcaaacttacccagctggccattcgctttgagtggatcttttccttctgtctgttcagcctcgctctcatcggactcgtcgacccagtcagagttcttctttccgttcttcttgttcttttgtttggaggtaggaatataatcctcttcttcctcgtcttcatccatcgcaaagatgttgtcgctttcatcatcttcctcttcctctgcctctttttcttcttcttcttcctcttcctcctcgccctcttctagaccttcgaagatatcttgatcgaagaacatggaggcattgtttgaaagtttcttagcagcaagtgcttgacttgtagtggcagtttcatcatccgaatcctcctcctcctcatcactgctgcctttctctctgtcagaaaagccctcccactcgtccacttcgtattgcttgcgtgtctttttagcacgcaatttcgaatccttgtcctccaggcggccggtgtactgctcgtacatctggtcgagctccctttcaagacggtcctcctcgtcgtcgctctcttcggtttcggactcggattcgttttcattttcactgccgctctcggtaggaagatcacgagcattgacaactgcatctctggcattctcccggtcgacgcgtcgcaaagtgaatgtggtgtcgtcacctcccataccaagctgctccataccaatttccatgggagtggtcatgttcatctgcattcgaatgatatccttgcgcttcttttcattctccttgcgcctttccttcttgcccttggtagtctgctgctctcgcatgcggatcaagtcttcctggatctgtagttcttcgtccataggggccacctcggccacttcttcttcctcgccttcttgggttggcttctttttgatcacaagtccgaacttctctcgacacttgatacgccatctgagcaagttgcggaactcctttttgcctagtaccttcagatcctcacagcaagttcggatctcctctgttgtttcctccaaacgatccagtgtggacaacgcaagatctccacctggcggttgctggaagctaagtttgttgtagccacccaagatagagatagggtcagtagtgttgatgaaatccgtcacggggatctccttgtgttgggtgtaatctccttcttcataaccttcacgcttgcgcttcttcttttctgggttgaaaaccttcgcttcgtagttgggggtgggagcggtaagttcagcaaagacgtgcttcgggtcgaggaacttcgggtcaatgcgctttggggccttgaatccgcggcaaacgacgaaaatttcggcagagacatttcgagacgaaggaggcttggttgcctcgacggaattgaacagctgcttgaagacccacagcagggggttgtaatctttggaccggaagaccttagtaacgaaggttccgccctcgcccaagaaatcagtagccagtctcagggactccaaaaccaattctgcctgggagaaagcatcttgaacccaagcggcaccaacgttgggcgcaccatcgtgaaggacgacatctgctttccagtgtttgatgtgtgatcgaatcgttgcgcgacacttgtccgttgtgatatcgctctggaaagtaatggctcgaggaattggcttgataggggagagatcgacaccaatgataagactttgcgcaggcatgtactctgcagcgacttgacaccatgactgctcggccgttagaaaaaaaaaaaactttggggataaaggtgccattcgaggatacttacaccaggcgcagcgcaaagatcgatacaaactctgcttttctctaagaatccatacttctgattcaattggatcaacttgaatgcggcacgggctctgtaacccttttctttggcaagtcgataccacttatccaaacgaccttttccatgctgcaaatagtcagcacatgaagtgatgcaagctgaggtacggtataacatacctttttctggatcgccattttgaaggaaagctgatctcaatagaccagagaatcctttcgaaaatgaccggagatgtagaacgaatgtatactttttttctatggcagaggatccgagaaaaaaaaagttgcattacttatcgctcaccgcctttgaaccggctctccagattgctgcctgaggccaaagttgcaccaaacatgtgacatgatatcactcaggcacccccggtcacttgtggcgcttggtagaagctttgtcacttgggtttgatcgtctaactatagacctgatgtttttaccctacctccatgacgcccaagggatctcgcaagagagtgaagaccagcccctccggcgtggactcaccggctgaactgagcggtgatggccgagaccgctcagactcccagtcacgggggtacaatgccgtaagctctttgtggctagaatagccagtcctttttgtcatatttactgatcatctatcgtttatatagagctggtatcccggctcctggtcttccattgcgaaagtgtccaaagcagcgccagttaccgaggttgcccgtgaaagcatctcagcagccaaatctgtagcatcgaacgtcacgaactcatcggcttctctccttgatacatcaacaaagaatcgatattcttctattcaacttacgcgaaaagcgggcgcctcgactaggtctctccccgctgacgccaccaccacccgagtcaacattgcgtcggatggttcggcttccactacggctgtcgacgatcccgaaagctccagggccctagaaccggcaaaatccgataaagaaacacccaacgaaagtgatatcaagccgttagaggaaccggccaaggagcagaaggccactcccaacgccgatcccagcacattgcatgcgggatctgcagagggccccgaacaatctagtcgttggctctcatggatatatggaccatcaactacatctaaaggccctacgaatgttccggattcaacgccagccgtggaaaatccgttggccgagaatcaaatggcagagcagagtactcaacctatagtgaaagactatacagcacgggaagaggaacaactggatccggaaccagagcagaccaaagatactgttgaagttaccctcacatcccagaagcgatcgtggcttcagatgtggtatggtacaaatacaccgagccagcaaaataacccaccatctacagaatccacgataaccccatccgcgaattccgattccaccgatacccctgacacaaaaatggcgccgcaagatcccccagatgagccagcagaacgagctggcggatcacagaccccggtcggaaccacgagatcatctggctggtcattctggtccaaagattcaaacaaagatgggtcttccaataaaccgcaggaagccgaagctatcgaggcgtcaatgggaccgaactcgccatcaaaccatacggcgcttgagccagatacagattcaaatatcaagataacccagaaaagcagtatcaaagtcaagcccacgaaagacaaacgtcttaaggttggacccaccactgaaagcactcctacatctacgccacctgttgaacctcgaccagccgatgttaccgcctcaaaacaattacagcaaattcttcccaaccaagtactaccgaagttcgaagaaacctatgcgtttgagcaatcgccctccattttgcagagcctcgggcgattcctgaattatgggaaaggaacagaggttcggcacgtcagtagggtcaaagatccgcttcatgtgagacacgccttggctattggcgttcatggatatttccccgcccctttcattcgaagtgtactcggacagcccacagggacatccatccggttctccaatatggcagcagacgccatccggaagtacaccgagagccatggctactcttgcgagattgcaaagattgcattggaaggagaaggccgcattacggagcgagtggatctcctatggaagctccttctgaattggatggaggaaatccggaaggctgatttcgttatgttcgcatgtcacagtcaaggtgtgccagtaacaattatgctagttgcaaagttgatacagttcggctgtcttgacgccaaacgagtcggcatctgcgctatggcaggtgtgaaccttggccccttcccggattatcgttctcgatggatcagtgggtctgctggagagctgtttgagtttgcactaccttatagcaaggtctcgaaagagtacgaagctgctctcaaatgtgccctcaattttggtgttcgcatctcttacataggaagtatcgatgaccaacttgtttcactggaggtaagtacataactcgatattcaaacatctatcaaatttctgactagcctccagtcctccctcttctcacctatagcccacccttacgtctaccgcgctgtcttcgttgatggccgagtccacaccccaagcttgtgagcaacttaacttcctcatccacctaatctcgatcgacgatcctaataacaaaacacagcctctctcatctagttggcttcgtcctcaagcttcgcaaccttggtatctcagaccacggtctaatccgagagttaagcaccccactagcaggaagtctatactcaggagagggacattctcggctgtacgacgaggaagccgtttactcgtatgtaacagtcataaatccctacccacaaacaaaactgacattatcttccagcatggccatagaattcgcactcgagacttcttccgtctcagactccgcgctcagcgtcaagcgagccagcagctccgtcacgccaaacccgtacattctccccttcgccatgcgtggtctgctcgaagaggagtatgtgcgtcgagagctgcataatgagacaatggaattgctcaagcaatttgacgactggaaaccttctagtaaggttctgaaggatgtaaagtttagactagaaggtatccggtccaagctctagctaagcttgttagtcgataattagaagtttcttgcttggatggaaatttgatattagcggtttattagatatggaaatacattttcgcttttcttaagtacttgctgccggtctgtatgtaagtacaataataacttccatgtatagcaacagtatatacattcctttctcggttttggtcgatttgtgatggaagttgtctttcatatttgtattatagcggagatgtcaaaaaatgtcgcgattttgttgagcacagaacgagaatgaatagtggagactccagtcgtaagaagaggggaggggatcattataaaaatgcaaatacaggcatgaaagtgccagggaaataaaaaaagaagctcagaacgaccgaagacaaaaccgccctggttaaacagatgcgagtgggaacgccgttttatatgcaccttcgatttcatctagaacaatgttagcgtgagaaccgcataccagaaaaagatacaacaccaacctctcatcccatccaatgcctcgaaagcaagcgaataattcgacaccgccccgatgatccgctctaagccctgccggagttcctcaatgagctggccagtcgaatctccgccttgctcattctcggcggtgtcgggcgcaagctgcttcgccacgcgcgccttatagtagatcatgaacatagcatagctactttgcataagacagcatgcgaaggagggcattgtccggggtaacgaacgaccctgctgctgctgggggtctgagagaggctgcgggacgggcaggttgtggaacatgcgggagatgacgagtgcggcctgtagacagatcttcgcggattgctgcgtgctgtaggggaacccagccgcgaatggatattgcgagtactgaggtgcgtatgagctgatttcggggttgatgtctgatgaggtggaggaatcggatggggtcatgtattccgttgaggttgctcgttcgagagaggttaggtttgaacaggagcaggtgatgttgttgatgccggcgggtttggtgctgacaattgtggtggcgctgtttggatttgctgccgtcaggtcacaatgtctttttatgaaaagggggatgtctgagaaggctcggaagcgatgcgttttgatttgggcactgtagtcattgttagatgggtttagatatgacaaggtgaatagctcgaacctggatagcttgatccgggatattgcgcgtatgctttgggctgtaatggattcgttgtgatcgccgaaatccgaggtctggggcagaagcgggagtagctccgcttgtgcaatcacagactgggtccaggcatcaagttgctgcattctttcgaacatataatacatccctgattgtgacgcgatgcacttgttcagatcaccaatgaactgggttgccgatacaagcacttgttgagcttgtataaagatagcccaaccctgaagaccggttagcggatgaaaaataatgcggagatcttcgagtgcaaacctcggtatctgatgaaaacgatgggtatggagtcgtgaactgcgggtcattgatgacaatagcaggcatctgtttctttattagctgcagttcatgcctgaaaagctaagttactcaccgttgtgctaacaatagatccttgaaccacacaataatactggacaacaattagatcaggaaccaaccaatgaaagaggagagatacaaacagtcatccaccaggctctccgtcgagcttccgaagattcatcgttctccagttgagcatggagtgacttgtccaaggcaattgcaagagcctgaccagcgcgatatcgcatcttgagtaagttaccgcgctgggagtattcataaactgaaagcaccaagagagccaggagactttcataatccaccggagtttgcgaatgaaatctttcccgcccaacaaacggtcgtgcggcagacaatgcctgtccgggatcagtcgaggacagatcaagatcgcactccgcttcgattgttgaatgggcaagttgggcgaaagtatgcgcgtatgttctgcgctggattacagatgctgcggacgacggctcaatatcacttgggtgcggaatcaaagccaagattgcagatattgcaagacttagaggtgaacggggccggtacatcatcatcggttcggatgtattcgagcacggaacagagcagttcaacggtcgatctcggcacggtggcgatgcccgtggcggtagaatggggaaataattatgaatgaagtcataataggcattcaatctggggatattagacaatatctggaacttattgcagagagatacttacatttcgagctcacttccataggtccttacaaaggtttgagcgttgttcgaaggtgatgatatcaggggcacttgcatgtgcgactgactaccatcgccagtaaagaagctctggaacatggagggaatttcggattgaaaatcgagatgcctcaaacctgcgccaggcagagagagttcatcgatttggctgaacatccccggtgctagactttagtgagtatattgcttctttttcggacatgagggcgacgtcataccttcttcaaactccgggggtgaggggacagaattataaagagcatcatcttgcctcgattcttgttctggcgatagggaggacttttccttctttttgcgtggtccgcctcgtttgctgggcaagtaagagcattctctatctttgctaacacactagagtgaatgtcagtccagtccagtccatgcaatgaaaataaacattgatcaacccagatccacaaaaataaaagcgcccaaagcattcaaatcacaaagagtacatacgttcgtgcatggcatctggccgccacatcgtgtcctggaagcccggctgaaataacattagtggagatgttcctctttttttcttcacgggatttgctcaccaaggcagacatgctaccttaactggcggtttggcgaacttcttgcgaactgatcgaggtgctgtcgaggccagtccgttataatcctgaaaagtagcggccatgacgacacctaacataagtacgtcaatctacagaaccatttgaaactgcacctctcggatatcttggcaaccgaatactagttgaaatggggcatttagcttaataaaatcggaagtccgagagggcgttgatatagagacttccgtgtgattgcttgatctaggcaaatcccgagccgtggggaggttcgggatttgctttttggtaactaagcagagaggtcgagtccaaccccaaataggagggtggtgccagaatgcggtgtatatgtagggtaatcgaatgtggatatgtttcttatttcagattcatttttcttttctttctcggtcgaattcaggggatcaaaagagaaagcgaaaacgaaaggcaattttgatattcgaagtatttcggattgaacgttccgatacgaaagatactagcattaactgaccaaactgcaacatgtgactgtaattttaccaaaaacattcgatcacgtggatccacagtggcacgccgatgatgtagggagtaagcgacttaggtaagattatctattattgagaatgatcacttgcaaatacttcaagattaaatttatggagtagttcctgtcgatttcttccaaacaggacgttcggataattcggggactatgcaacggtgtggatcctgaaggtatcgctaagccactcacaatgcgcgcgctactacatacatgatttggaatagttttcatgcgaggcatcgtcgatcgatgctaatcgactattcacggggatgcgcataatccgatccgtaattagacttaagtatgggccttgccttttccaagggggaccttaaggcccacaacatgccgcacactatcccagacactgtcctggaccttcacagggatcttgtgtccctttaagaattggtcgatcaaccacattccaaccacgaattcttcacgcagcaagagtccgttattttggtgatcgaccagatcccatacttgccccaagattgcctctgacaggcggctgcgggaccagatctcccggacgaccagattgagaaccatctccgaggcatgaggtggccatgactcgcttccatcggaatcgggagggatgagaagccctttattagacgcccaaacaccttcgtaccgcttgcgttccctctcggtgacctcggttcgccagcgcttacggtccccctccctgtgtttgtgagggtgtttgtgtagggggtttctatgcttgcgatggtcggcatcagtgggtttcggcatgccgcggagtgtcatcggcatgctcttcggtggacttggtgtcctggacagatcagtcttgtgatgatggtgtgtcaaatgtagaatggctcgtgcccctcgtcgatggggaggaagcggcgggggaggattgggagatggggatgctcgtgatgatgccagggatgaggcgataattgcattggagagggattcctcggtcattccaagagagtcatctattagactggagctactcgtcgtacgtgaatggtttgacatggacgcctcgctcggtgtcgaaggtcgcaggggtgttgtgatgaatccatgatttctgatagaccctcgtggtggaggcacacggggcggaagcctcggttttgactcatcagacggcatagaaggattcagagactctagagaaggatggggactcggtcctcgactatcctgatcatccagagttgacctggattgttgggatggagagcgcttgtagataggcagatctgagtcggactttaagccactttcgtgcagcatgcgacctaagtagatatctctgtcatgtatcgagcgaagagaggctggtaatggtggcacccggctcgcacttcgtgctgcacttgcgcctgctccaagtctggcggttgtcgacggaacactggtgtctcgcccaggggaccttgacgcagcgagtcgtgccgcaatttgggaggtcgaggtcgaggatagagaggctgctgaagctcgtcccctcaaacttgacaatgtactgactggaggcgaaggtggcttggcccatctcccgattttatcctttacggagcccacttcgggggcgtcggatccagctctctggcgacccagagtatgacggtcacttgccattgcggcagtggcaacagaggatctagggttcacattaggtgagtgatccatagagtgttggaatgcaagcatggcgccttgtaatgcgtcattccgggccacgcccaaccgctggttcgcggaagcggcctcgccatccatggaatcgattccccacagaatccgacaagtaagcgagttatgttgaagggaattatatcaagatcaagataatcaatgatcaggagggtcctgcgatttgtttctgagacgtttaaggggaaatatcgacgggaaatgcacgtgcacgcgaccgtacacgtttcttctacgcgactatatatgttgcatgtataaaatcacatatcacgattaaatccttttcagatactgtatctagatgatttctctattttatcacattcctaacatcactattattactccgtatactctagtgactccgcactgtaaccccagattctaattagccgagccgcaattcattcatccgttctccgctttgcatccttcccctccatctgcaatgtgacttacatgtcagcctggcttggggaaatgttatcttcttctctcaagcccagtcggagccatgtcgggtaaagacaaccccgatgattcccctgttgaaacatatggaaggtccgaagtccgccaagatacagatcagaatgcagacgaattggtcgccggccacacccgatgctcagtttgtagcagtaccttccgacgaccggagcatctgaaacgacatctgcggagtcatacaaaggagaaaccatttgagtgtgtccagtgcggccggcacttttcaaggacgtatgcgcttgggctatagttatccttatgtcgaatcatacactaatcaatccctagtgacaccctccatcgacatgaactgagtcaccatgcaccagggacgggagggaaagaccgcacccaccggattactgtcaaaacattccgagcatgctttagttgcgcaacggccagagtaagatgtagcggcgggacgccatgtggacggtgcgacgctcgctcgctcggatgtcaataccccacacaaaggcggtccaaagccaaagacatgagagattcagggcaaggagccgatgcgcaaaatgacaatctcaaacccatgcatcaagacttgaattcagcttctagtcagagccaattttctacacaccggcaaaaggagctggcatcatccaaaacttcgctcaatgtaacatctacacccggcagtgatcacaaaagacaaatatcacaagatgcgcacaccattgcaaatgccccgaatcctcgtttccttctcccaaatgagatacgacggccgtctgaaatactgccactgggagcttaccagacgtatgacaactcgagctccaatatcctcaaagcattccctgttaattcatccaacaatctaagctctgaaataagtgataaccagccgggtatggacccagcaggtaataattctgaggtaccgctagagtttgatcccacgttctttgaccagtctacgctttccactatcaattggctccctagggagttgcttcctagtgattctaatggctacgcacagtctaccggtgtttcctcgcgatacaaccaatctctcagcccaagcgcctacttatctcggacagagtggcaaccgccaattatcagcgctgagcagctcaatattttgcaaccagagcgagattctcagacaccctctgtccatgtttctctaaggaacaacatggaaaccttgaatcaatattcccacggtattagcgagccttctccgcatacagaatctgtgaattctgctagggggtcagcagactactatgttgatggtgcaccatccagacgccctaagtacgcgccttggtccagcgaatctgtagagccggttgatattggcaggcatttgttggtcgaagatggcgagcacaggttcaacttccctataatttccgaactgcgaacagatcaaatatcggaagatataacccggtgcacacgacggattgaaatctccacctacgatgagatttatcggtactttgttcaactgtgttgcaacgaaactcctttttttgaagtgttcgaatcggagaggtttcccaccgcggatgaatgcaaccagttcatcatcttcttctttgatacatttcaggctgtttatccgatattacatctttctaaatttgaccctaatacaagtcattggctcttgaccttgtcagtaatagcgctcggctgccaggtgtcccacatttccgagatggagcagtgtacaactgctctccgcgagctgattcggcggggtatataccttgaggtgagaaaggtccccttatccccattcaatgctttccagctaattgttctacaccaccagaaagaaaagagtccccctagtcagtcttctcttgagatattacaggctatgttgttcaattgcattggacttcttcatagtaagagcgagagagaaaaggcctcggcattgagcacctttggtgacttggtgatactcatgagaacttcccggttattgacaccgatgcggattaaatttaatgaggcatcccaggatgcagcttgggcttcttggattcaagatgaagtcagaagacgcaccggctattgtatatgggtgagctttgtcgaagaatggagcctttacttttactaacgatgatagcttgtggattgtactcttgcatattactttgatgatagacctctcctctccctagacgacggacaagctgcattgcctgcacatgagaagctatggcaagcatcctccgcagcgacatggaaaccactgtgggcgcagtcatgtggtaactcttattcagaccccaaaaccgaccaatcgctaacttctacagtcaatgaatccttatacgacgcagtccatatcctctatatcgagaagagagtagtgccaggtataggagaattcagtcatattctactcatccacgctctctaccagcgaatgtgggaagtgggagactacttccgccgcccactatccttctggagcccgacagcgaagaagcaatcttgcgagaccgccattcccagcggttcggtatggctcccaggaattccctcatactcgaaatggcgcaatagcgcatgtgactgcctcgacatccttcattggaccgccaacagcaccgcagccaaagctggaggcctcgagcacccaaccatcctccacctccacgttgcccggctattcctactctctccgttccgcgaaatgcgctccctcgcaacctccctggtaacagaaaagcagcactggcgcaaacgacaccagtccctcgagtggcaatacatctggcgctggatgaaacacgaccaatataaagcccggctatcaattatccacgccggcctcacgctctggcatattcgtcgctactcgatgaacgctttccacgagcctgtcgcggctttcatcgccgtgctgacgctgtgggcatacggatcctgtcacccgcatacatcccatgagtccagtccgcgtgcagaactgctccacgaatcgggttttattcagcttgaccggccttgcgatgatgagcttgtgcagattttcgtgcgtgagggtcataaaatgacagtaaacgtcactggtgttggtgatatatgtggaactgagggtccggaaaaggctctacgggttgggtgtgagattctttcgggcttaacggcgtggagtgtttcgaagaagttcatggctatcttgacacggcttgcggatttgagctcttatcattcttcttgggaataacatcgccagcatcagcatgatgctgagcatatctgatttggagcgggatgaacgatgaatttaccaaatatataaacaccttcaatacactagcttttgtattggtcttttggtatgttttatatataaattggagatcggggtgccatgggctagttatatattcctttcttccgatgatggttagcaaaaatagtgacgttaccgccggacaccaatcagttacgcgattcgtaacgggcatcatgaagttgaacgaatcttgaatggtaggataaatgtaggtataaatttggcgaaggcaattgagaactgtgatgatcatcagagtgataacttctttttccgtatagttcgagtggggccatttttatcttatcggcagtgcagcctaaaaacatctggggtagtgcgaccttccgactttcaacttccaacctccgtctcttaatttgcctaaatatggattccgacgagatcctagagcaggatctccacaagccagagaaagaagaagatttggacgaaaagtgagcccataactaactaacggttctgggtagatcactgatagctgttggcagataccccaatagacctcacaaccgggccccgacattgccgttccacgatctgtacctcagtctattcaatccactgagtgaactcaagaagaaaccttcggggcctcctcaagctcgccggaaagttggtccccatggtaaaggtgctacgagtctcaacccgttcgagcgccggcgcgatgtgattgagcgcttcatttcgcggtggcgcaaagaggttggcgacgatatctatcccgcatttcgattgattcttcccgacaaagaccgcgatcgacctatgtacgggatcaaggagaaggctatcgggaagatgctcgtcaaaatcatgaagatcaacaaagaatcagaagatggatacaatcttatgaattggaagcttcccggtcagggcgctacaacgcgtatggcgggtgactttgctggaagatgctttgacgttctctcgaagcggcctatgcggaccgagccgggcgacatgacgatcgacgaggtcaatgagaagctggataagctatctgctgccacaaaggaggatgaacaactgcccatattggccgagttctaccggcggatgaacccagaagagcttctgtggctcatccgcattatacttcggcagatgaaggtcggtgccaccgagcgaacactctttgatgtttggcatcccgatgccgagagtctgtacagcatctctagcagcctacgacgtgtgtgctgggagctgcatgatcccaatatccggcttgagggagaggagcgcggtgtcgcgttgatgcaatgcttccagccgcaactggcccaattccagatgcattcatttgagaagattattgctcgtatgaaaccaaccgaagatgacaaggtgttttggattgaggagaaaatggatggtgagcgtatacaactccatatggcgcctgacgattcaatcaaaggcggtcggagatttggcttctggtcacgcaaggcgaaagaatatacctacctatatggaaatggcatttatgacgagaatggtgctctcacaaggcatctaaaagatgcttttgtggatggagtacagagcattattctcgatggcgaaatgatcacctgggaccctgaacaggacgccatagttccttttggcaccctcaaaagtgcggcgctggcggaacaacgcaatcctttctcaaatggtccgcggcccttgttccgtgtcttcgatatcttatatctcaatggacgcgatctaacaaagtatacccttcgtgatcgtcgcaatgcgctagagaaagttatccgacctgtccatcgccgttttgaaattcacccatacgaggaagctactagcactgcagaggttgaagcggctctgcggaaggtcgtcgctgaggcatcagaaggtcttgtgttgaagaacccgcgctctccatatcggctgaacgaacgccacgatgactggatgaaagtcaaaccagactatatgaccgaatttggagagtccctagacgttgttgtgattggtggatactatggctcgggtcgtcgaggaggtgcgctgtctagttttctctgtggactacgagtcgacgacagcacacaagcagcagagaaattctggtccttttgtaaggtgggtggcgggtttactgcagccgactatcaggaggtgcgtcatcatacggatggcaaatggaaggcgtgggatgcgaagaagccaccgaccacctttatcgaactggcgggtggagatgcccagcatgagcgtccagatatgtggatcagaccatccgactcaattgttttgtgtgtgaaagctgcatctgtcgcaattagtgaccaattccgcatgggattgacgttgcgctttcctcgcttcaagaaattgcgcaaggacaaggattggaaaacctcactctcggttcaggagttccttgacctgaagtcaaatgcggagcaggaacaccgggagaaagagttctctgttgatcactctcgaaagaaacgagtgaagagagccactaaaaaaccactcacggttgctgggaacgatgataatgacgaggtccagtatcttgggccttctggacatatcttcgatgagcttaacttctgtatgtgtgctcccttcctatcgtacattatactaatataatggccttctagtcataatgaccgagtcgagcgtcccagaaaagaaaacaaaacttcaactggaacaactcgtgaaggctaatggtggcaagatttatcaaaccaagacagccggggtagacactctctgtgttgctgagcgaagtgagcttcattctatatataaaacaagtctaagctaatgtttcagcaggaacggtcaaagtagcttccttacaaaagagtggagagcaagacatcattcgaccatcttggcttatcgactgcgtcaagcaaaatgaaatagatgcaggcctgccggatctccttctcccattcgagccaaggtacgttttgacagccaaaggaggtacacatacaaggggctgataattagcgatttttatagacacatgtttttcatgacggaggataaagaggaagaagtcacagcaaatgtcgacaaattcatggacagctatgctcgcgatacaaccgtcgacgagctcaaggatgtatgacacccctagaaaaaatagcgagcaacaatcatgtctttggctgacaaatgttcaatcttacaggtattcaagcaaatggaacaaaaccaagagcagcccgatcatgccccagacccagcaagcgttcggagaatcgaagctctcatccaggaaaaagtaaacgccggctacacggttccatgtggatggctctttcgaggcttgaagtttcatttctactcgagcgaggatgagcaagacgaatcagcctccggagaactgagaaaggagcaccaacgcctccagttcgctcacaacacagcccgtttcgcaggcgctgagaactccagcttgttaaagagctcaggtaccacacacgtgatagtcgacccggggactttgtcttcagcggacatatcttctctccggaagtctctggccgaaaagccgggcgcgaaaatgccgcatcttgttagtgtggactgggtggaagaatgctggaaaaatggcaccttgctggacgaggagagtaagttgtaaccctcttcttcatatttatggctttttgggagcgttctaataattgctggcaggattcttggttcggcgatgaatcgtgagagctgagttcgaatcgcatgataaatcatgcatctctttcattttctgatttgctcttttggcccttgagtgtaatatatttttgttcccgttcttttgtagccaggcggcagaccagcagaatatacgtaacggtgaccaccatgcggactgtcgatttatgagctgcttccttgagtgccgacggattcttgcctagccctgtattcattcaacctgtcaagaacactggccccattccataattcttcatctccatcaatcctctttggcattcctacttgctctaatgcaaatgaagctgcaacagacccataacaagccgcctgttctatatcacctcccgtttggaggtacccaatagaatagcctcctagaaacgcgtttccagctccagtcggatcaaccactttagcagcctgctcttctccagtccctgctatgtgaaatgaaggtagccatttggataggttacccgatcgaacaaagcagccattttcaccagctcggataatcacagtaccctttccttccgggccgacaccactggctaggaatttcaaagccagcgtttcaatctcagttctatcaggagtagccggggtatccacaaacaatgcagctagctctaagtggtttggactaaacacgtcgactagggctacaaccgctagacagtcttgaaggttctccggcttgcatgaaaggggagccggttcccagataatcagaggacgatgttgtatacccgcctgctttcgaagagcgagtatgtttagaatgcgcgttctcatatcttggggagtagcaagatagtgatagattttcgaagttagcaaggctgtgcccggcaacttgctttcttgaattgtaagaaccggggtggtgtacttgaaattcttcgctagaagatgactcgaagttagctcatgttaatatgttatgtttgctgatttagtacgcatgaatatagaatttagaattatcggcaagtgaatataaacgggaatagcaagggcgacggaagaagggtaaagggaagggcttttcgcacgtccgaatgtggtatcttgatactccagtaagcctcgagtcgagggctggtctgattcttttgttatcaccaaaattgtatcccagctatgcaagagttctgcaatagggtccggaaagtcatttccaatatggatcggccaagccaaggagcggctcaatggagaaggcaggaacaaccgagcacctagagtcgctaggaaaaagatacaacgatcaggaatccggttgtttcaatcgagacattacaggcaaaaccaaccgtaagctccggacccacccagcacattgattaaaggtttccggttggcgaagcgaatttcgtcaagcaccaccaagccaaagcttacgaaggaaatatccttggtatccatggggaagatgagcccccaaacctctcaagacaaaattgagttgaagtctttctggggttgagtcatatatttccacttgaatgatctgtacataaacattgaagtgagtcaaataggtgtagttagagggaagccagtccgtaagctcacatgatacaacacgtgagccacgactaaggtaaacaaggaaacgttggaggcgaacgtgatctcaatgctctaaatctgtactagcttggaaatagaagacaatgaccctgttcccacttatcagaggagatcatggggttttcggaaccaatgattgttatcaggctacgtggatgatgtcatgtcgaatgcaagatgagatcacacagtgtgttacaagttgatctaagacatctattaggtacacaatgtctacgtaagtatagccactcaaattccctcgccagtattctagaattattcttaggagcagcattttgatgtaaaggacgaacaagaaccaacacaagcaaggacggagactctcccatagtatgttgtgtgctttacaactaccaggcaagaagctcaatttgtttcaagatttgatttgagttgaatagatatcttaggtagtgatcgaaatatcgatccgagaaaaagaaagaaaaagcagccatagaaaacgcatagcgctgtcaaggtagaaatgggggtatgtaacaaaagaaagaaaatatctgcgccgagcaggacaccgtcctagtccaacgccgcgcttgaggataaccgaaaataagaggaaaagaaaacaaaagatttatgtactgaagtgaagtgtgcccaaaaagggagaagtgtcgtgccataccttgcgctctgcgctaatacagtctgcccaaccctttgtttcaatgggctgagacgcccacccatcgggtcggaacggcgttgttgtcatctccgtcttcgtactgtcccgacaaatgggaattggtcttgcgcgctggcagccagatgcgagcacgggcggggatgtcatcgcggagtttgccgctgcggcgcatgttcatttcgagaaccaccacgcgcaagaaatcgctgttctcacgaatttcgcgctgacgcgacatgggtggattttctgggtcgaaagcgacaaatttctgatccttgctcgcgatgtggaaatggctccgccggttcccgcggccgccggctcggcgatatgtctgcatttggatcgagacggggcacgttttggaggtctgtagcttgtcgaggggatgatcatgatagacatacatctcggccggtgacatcggagtcggattcatcggagatggattcaggtagcggcgtagtgctggagaaggggtttcttgcatcggcaaagggcggcgatcatcggtcatctctggggtgatggtaaaaagagaccgggtaaggaaatcctctgtttggacggaaggggtggcaaatgtcgagaccgactgcgcagcggatttgatggcccgtagagatgctgtgaggtttgacttgaaactagatcccaggcgcccaaatgacgcagatcgccttgcgggtacagcgtcgggtgtggcaggcccattgtcgtttttgatttcgatgtattcgagttcatcgatatcaatttcgtttctaaggagaggatggtctaagtcacactcctcgcaattcgaataccgaggctgtcgtctctcaggtggacttctatggttggaaggggtgggcggcgagagaagactggatggcgatgctaggccatggtctaatgagggtatcgaatcgcttgaggttgatctcactgacggtggtgattcatgttccgaatcgtggcaaggcaggagtttatccggtgggctgagcaggatgtcaagaggggagtaggcggccccatccaggaaactctcttctttcgactcaatatcttcctgcagcatgcgactgaagtcttctacatgatttccacgagggagtttccgaggtctgcgggcggtccagtttcgtcgcggaacagggatagccgttgcatccaacattaaagtaaatgacgtagggatggggcgatcactggacgagctggaagaggaccgatgagaggattccgatgttttcgataaggcccgggaacgaatctctcgacgtggaggcagagtccgcgagccacgctttggaggaattaccactgggatggtgttgatcgatctgcgggattcggtgttcggggtagagagaaggctagaataatccggcggcgtggatgggttcattccatgagactgaaagggtttctgcggcggtgccgagctgaataggaatgctctcgggaccatcatattgactgtttttcatcacacgaccacggttgctatagagcctcggctttaaccagatgaagcgctctggtcgagtttctgcgcgagatacatggatgaaggggagaagcgcaggaagtgagaagcccccagggagtcagacaagagaggaccagcagccaatccgaaggtgtgtgtgttggcccaaagacatgcaagggaagcggatagggccgtgagacaagggtatgcaggcacacacacgcgagccgataaggtaatagagacgagcgatcgagatgggagagtcgggaggatgaatatgagacaggagggtatgaaatgagcagaaggaggagaatggaaagaagtagagaagagatgaggtttaagatagagagagagataatgggaggaagtgtgggcggtccacgggtggtgatctcagatagataagccgtattgggcaggtaaccgcatgtaaagatcacgggaggtgcaggacgtaatttattttaccgtgtgattgattggtttgtgcggggaacaatgccggcagccggcttgcgtccgattgtaacggtatttcactcgattttcaatacaattcttattactcatggaacattccgccggtggagtccggaaggaaatgactttttatagttagtcatctcgatattttcattttatgccgtatattcgatattatgacatgtacaacatagtatctgcctaaatatggactctacaacgcatgattagcccaatggagtcagacatgcatatatagtatataagatgtatatagatgtatgaaaacgaatcacatccatcaacccttcagatcgttgaatagagatgtgggccctttaaggttgcttttagtgcgatgcgggcagatgcacacggttctctccaggttcaaggactaaaagagaagatgtattctacttaggtacattgactaatgtttgcttcttttctattaactagttaactagttaattaggaaagcaacttggaatgataaatacacatatgtaattggggtcacttgggtagatcggcaggagctccgagactcactccgtatctcccatatttaaggggaaaaacactaaaatggagcgggtggctgcagtccgaaaacgtaaactcgaagagatccgacgtggctagtggagcgccataagcgaaaacaattgcggtgaacccccttttttcttcctatattggtggcttataaatgtggctgttattgtaatttgattcatcgcacttccaattgtgtatcattgcttccggagcaatccgtacggagtcctccgtacacattgttacatatgcaaataagccttgaaaagcaaaagaaaaggggactacctaggtacactgttacctacattcgtatttgacctgttcgaaggattcttatagatgggaaatacacacacgtcaaaatgtcgataatgcgcacaatgcccaaaaacggaaaattcgagacgtggctagtggagcgcggttagggtaattgcggtgaacccttatataacatacgatgtaactatgttgtacaatatatagagtggtttttcccgtcttttggtgagattaggcagtcatgcatagtattataacatgattggctttatctattattcagtctgttttgctggcaattgtatgtaacctcgtctactccgtttttgtctgtaaccaacccaccaagggttgaatccttcagggaaaacccggaacaggtatccggaacatgtatcggggataatatcataagactcacctggcaagtgaagcaattttccctttccttaacaattatttcgatataatcatatggaatgagcctataatagacaaaactacctacaatcgtatgtacgtgtctccatgttgtaactagagccgccacgtgaatacattagtcagccacttatcgaaatggacatcccacactgcacagccatccagaggccggcgataaccacaccctgcgtcgtcgctcccaaggtgcttgcatccaatcatttcaagagcatcatcaatttctaatctcgccaaaattctgcactgggcttgtccccgtctccactgcgggtcattgcaatcgtggggtacatgattcattctacaagtgccaggcctgtgtaaatcttcaagcgtagctggtgcgtccatattttcttgttgtaaggcgcaatgtccgatctgagcgcctggctaaacagattgaatcgccatggatggtccgatagactaacatgccgacatagccaccgtgtgcaccctcgatgttctactaatgagctttgtactctaaaacatggacatcccatgtcgaggtttggaccagtcaccggcaaacacgacactaggcatgcgaacaggccccgcggagaaaccaccatactcagttcttgaatcgcacctatcaaactatctgagatcatgagtaccgaacgtgcccaaccgtctaaaagacgatgcgtcagcacagcctgtgtcgcgtgtcgcaaaaggaagtcaaaggttgggctttcgaattctgatgtcgaggtgtcacattactaatatctgcacgtagtgtgatggaaacctgcccagctgtgcagcttgctcctcggtatatcatacaccttgtatgtatctcgtttacagagagcaatacgagcattgctgactatgtattcataggtgtatatgatcccaactcggatcaccgccgcaaaggtgtctacaagaaggacaccgatacattgcgcacccgaaacaccaccttacagacattgatacaggcaatattaaactacgacgaagcggatgctttcgaattagtacgtcagattcgctcctgcgatgatctcgaagatgtagcggcttcggtgatcgcccaggagaaagggctcatgtctgcggaccaaacagcaaaggagtcagccagcaatgagaatgcggctgagatagatcaattcgagtccgagctggctggcaagatgagtgagctcatgctcgacggttctcgaaaatttattggaggtacctcgaacctcatcttcttgccgccaggctccgagttgcacgagtctgcttcgatccaaaacaatttcgtcctcgatggtaataatcaaacacacgctgtgagccgctggacagaagttacagacgactcctccctaatcagtcatcttatgaccatgtacttcgcatggcattatccgtttttcaccatcctagctaagaatatgttctatcgggattacatccgcggtgtctctagttcatattgctctgcattactcgtcaacgctatgctagccctgggctgccatttcagctcatggcaaggtgcttttgatgatccccagaatcttgcaacagcggggaatcatttcttcaaagaggccaagcgacttgtattggaaaatgacgaacatgagaatgcgaagctttgcacggtccaggcattcgcccttctgtctgtccgagaggcaggatgtggccgtgaaggaaaaggctgggtctatagtggtcttagtttccgcatggcttttgacctagggttaaatctcgattcggcaaatcttggggcgcacagtctcaccgacgaagagattgatgctcggcggatcaccttttggggttgctatctcattgacaagtcagtctccattcccttgcttatctccaatgcatctctaacactctacagatgctggtcaaattacctcggtcgtcaaccccagttaacctcgactaactctaatgtacccaaggctgatgtgttgccacaagaggaaatagagttatggtcgccatacactgatgctggagttggtcacgagcacacgcaaccgtcacgaaccagggctgtcgcgctgcagatatccaaactgtgtgagatcagcagcgatgtacttgtgctcttctaccatccaaccgaactcgaaaatcctcagtccaaacagtcggaactgaagaaactgagtggtgttcacacccggcttgaggcgtggaaaaataacctgcccagggaactggtggcaaaagacggacagctaccacaagtgctcgtcatgcagtaagttgacacctacgcacaaggcgttgcctcagctaactcttggctcagtatgctgtatcagcttcagataatccatttatatcggccattcctaaagtataccaaggctaatactccacttccttcccatgtctcacctcgcaagatatgcacccaggccgccgcgactgtttctaagctgctgcgtatgtacaaacgaggatatggactgaaacagatctgcaacatcgccgtctatattgcccacactgcatgcaccatccatcttctcaatctcccagacaaaaatgcccagagagacgtgatacacggcctcaagaacctcgaagaaatggcagtgggttggctctgcgctcgacgtaccctccgcatcctcgacatatccgcaaataaatggcaagtagagctaccacccgaagcaatctctatcttcgaacgaacacatcacaaatggggctcctggggctcctgggaccaagcgacttccccctcaacatccgacgactatcccatcccaaccatgccacacccctctacaagcccgagtcgattctcaccgtctgggctgccattcccacattctcacaccgagcccatcgccatggccgagacaccaatgggccctcaatacggacccctcgccaccgttccgatatcgttcccctccatgcaagggatgaatccacctcaagcccgacggcccgagtttgcccttcccgaaccaacatatctccggccccaagtcgcctaccaattcaaccccctcccgggatccgttccgactccctcttctcctcatccggacaactggtacgatggctctggggctcatatatcaccccaaaacgcaacgccgacatcggttgcatcgcccgtgtctgggtatgacggcacggaaaacctggtcgaggagagccatgactggtggtcgagaaatgccaacgcgtataacatcggcatggatggttggagtggtacttggaatactgctcctcaaaaccagccttctgtcattcactaccaggatggtaatctcatgtctgttgctcagccttctagttctggcgatgagcagttacaggccccggtgaggatgtcgacagtcgggtcgcccgatgacacgactgggtatgggagtaggtgggaataatgcgtggatttggtgatttttgacttatgggaacatatatcgtgcgctttttgataccacttgaggggcttcttatattttcccggcgtttatggacatgccatctacaaatttgtttctgttccgaaatcttacgatcaatttacagacaaaaacattcattgtcaaaagatttgtcatagatgatcattagttctcaaaaaccagaaccaaggtgcaaaaggctacttcccgaatgctgcttgaaagagaaagatataaaagaaaaaaaaaggtgcatgggatggtatcactaggcattgttgttagtacaatgatatcagtcaagacaacagaaaagaaaagaagagcttaccaagaaataatcagcgacaggcttcttcgcgggcatgccccgcgtatcctgcgctgcagcctcaaagacacggtatctccttcctgggctgacgactctattatctgcaacaatgccgttgctccgaccatattcaccgttactgcgagcgacagtgccaccgccgctggtgtcttcacccagctcaaggatagcggcaacattgccgcagcggtagcagtagttcggtgcagaccagacagtgacgatgccaccatcaaacatctctttatatccctccatcacaagctggtgtgcacgcgcgacaagagacaagccgttgagatggttgaactgtttgacgatatcgccgccgaagaggaacccagctccgcgcgggctcaacccccagccttcgatctcatccgggtctgaccagagcagatcgcacatagcaccttcatgtggcacctcttgcttgcggtcaatcagtcggattttatcgacagagtcaatgagcggtgataatccaccgtgtacacagagcaccgcaccagtccggctagtcacggcgctgccgttaccatcaccactcgcgcccgtgcccggtgcacccgatcgtgagggcgcggcagcctggcctggggcggcggatatgtctcgcggcggggagatatttctggaatctgtggatgcttcggaagaggaacgctgtcgcgggcggtatgtattcatcgtgaccacgcctttggaatccaatacttctatttccagctcgtcttcgtttgatgatgctgaggtgggtactagctctgagcttgcgcctagcacaatcgcgcccagggccaggtagtcgaatacttcgcagcaataccgccatacattggcgctgccgtattttcgaatgcattcgtcgtaaaaaccgtatactgttgtgatttggcgtgattcgtggttgccacggattagggtgatgcgatcggggtatcgaactttcaagcaaaggaggagaaggaaggattcaagggagtagaagccacggtcgacaaaatcgcccatgaaaaggtagttggtgtctggaacatcgccgccgacgcggaatagttccatcaaatcgtggaattggccgtggatatcgccgcaaatggtcacgggagcgtcaacggacacgacattgccttcttcgatcaagagctcacgtgccttgtagcaaagttcgcgtacttggctttcggggatcaggcgacaggcccgcagctgctcgatcgccctgttagaaacaaaacattagtttgacggtgaacgatggggggctacagatttgaggggttgatgccataccggtctaggttactcatcttgtcgaaagagggtgaaggggggaaggaaggaggaactgttatcgaagtcaagaaatccccttaaatagaaatcagatggctcagttctccgaaaaatacagtcccatcttcgcgaagctctgatgcgcaacgcagaaacttgggggaagcggaatatccaatcacgcgggagccagataagattagatgcacccgaagcccttcgctctcgtcttctctccgcactctttcctttgtgaccctttacatctgctattggaggtttaaaagtttgtcaacttgaataattctcactaaacattcaattgaccttcttttgcctgctattccttctcttcttgtccgactatacccgcctgcctactccgagccctccgatggcctgaaaaatccaagaaacagtcggccacgcctacctcgtctcaattgaacatcaatactcgttctctctcagttcacacacaatgccaccacatctacatcctcggtcgcggtcaactaccggcctattcgccggcacccttctcgcatctctcctagttgtgggaatgccgcacgtcttcccttgcccggccccacgacgtacctttgccgattcggagatgaccatgacagccaatggacaacaaataccacgcatccgacgcagacgacggaaggatggtgaagtgggcccagatgacatccagctgggtcagcctatgccagatgttgtcgatgaggaggtctcgacattccttcagatgaaggcggaagcagagaaactctcacacatcaatcgagaatgtcctgtccccaaacccaagggtgttattggggaattgctgggcttccgcgatatccatgcgaatgcccaccaccagtcaaccgccctgtccgaaggagaccaatagtgcgtgcacatcgacactctccttcgatctttttgcactttgttttctcggcttgtttaatgataccatggaatttgacaataagggtttggtggaccggtgaatgtttggaaaaaaaacaccctgcgagctagacctacaacatgtattctctatgtatagtgagatgtataaaagaaataccaattatattaagactagaaatagttgaaattcagacaattgccttacccacaaggtgttacccccaccttaaatgcagttagttgcagacatttatttagtacggcggagccagctccagccaccttgaatatttttcccgtcaaccatcgaccgtatctcgccatggcatcgacagacaagagcttcgtctacgacgtgctcactaatcagcgtcacacaaaatggattgcagctctactcattctaggcgacgcgttactctgcactctcgtcatatggaaaatcgcttgtaagaccgcgtccattgggtaccgaaccagatctagctaaccaagcaacaaccccagacactgagattgactggtcgacatatatgcagcaagtttctctatatatctccggtgaacatgactacaccctgatcaaaggctcaaccggtccgctcgtctaccccgccgcccacgtatacatctacaccctcctctatcacatcaccaatcaaggccgtgatattctcctcggacaggtgctcttcggcctgctctacctggctacactggctgtggtagttgcctgctacaggcaaacgggggcaccaccctaccttttcccgctccttgttctgtccaaacggctacatagcatattcgtcctgcgtatgtttaatgatgcggccgcgactttcgctatgtggctcgctatctacctgtgtctgagacgcagttggacggcgggaattgcagtgtggtctttcggggttgcaattaaaatgacacttgtgctgcttgcacctgccattgcggtcatcacccttctcagtttgggattggtgcgaagtctttcgcttggagctatggctattcttatccaggtgggttcttctcaagtcaatgagttctggggagtgggctaacgaaagaaactacagctcctgcttgcacttcccttcctccagacgaacagtacaggctacttttctcgggcatttgagctatctcgccaatttgtgttcgaatggacagtgaactggcgatttgtgggagaagagacattcctctcaacggagttctctgtgggcttgctagtgctgcatttatccttgttggctatcttcttcaaaaactgggtaaagccttcagggtcggacatggttcccttcctcgaagaaactctccagggacgccaaaagacagttacactcccaaaatccttcactatgaccgtgatgttgagctcactggccatcggaatgctatgtgccaggtccttgcattaccagtttttcgcgtatctcgcgtgggctaccccatttcttctctggcgcgcaggtctccacccaattcttatgtacgccttatgggcgctgcaagagtgggcttggaacgttttccccagcacaaacacaagctcgacggttgtggtgttgtcactcgcggtccaggtctttggcgtgtttttcaatggataaagcgaggtagttaagaagattgagaaggggagcaaccgcggcaaggcgattgtccaaaaatgagagatatcctggccccaattcatactgaggtgtgcatatttcgagaatcattgttgatagcactgaatcctgtgtaccgtagcaaccattgaacaaacgcttgatgcctttgaaaggcgatcattcagtctgattcgtccgaggaaggcatttggcctacacgagactcctcttcgtcgtcagagtcagcagccaatacaacgggttgtttcacgaattccttaggcctgggaaagcagttccagttagcgaacgagtccaggcttcttaatcgaaatcacataccaaaagcgagccttcctccaagccttctcgtccctgacgatattgacaatttcccctccaattttattttcccgctcctcctggcccttagtatcgaccacgaggtacgaactgcgcttgatccagatagccgagcggaatcgtgcaggtaattcgacgagcatctgcttcttgtctgtctgttcgactaggtagatgttgtttccggtagctttgattgctcgcacgatctgctgagtgtcggataactcgtctggaggggtcaaggttccctctgccgtagccatcatctttcggcgaggcggtcccattgttgaagatgtaaattgaaatttatggtcacgaatgcagagatcgagtgcaagagaaagttgggaaccttggaaggaaataattctccggaaattaactgatcttatcggtggggcaggtttcccctgcccgcattactccagttgcctcatactatggccttggaagattgtgccggtatgggatcaaatcagcattttgaaggagaagtttactcatttaatgttcctccgggggcttgggtctacggttatatctgatcaggtaccaaatgcggcaatattgaatatccttcacaagaaggctcccttgatctgcaagcttctctcttccgcctaccaagtcgtggtcccccaagacgaactaaaggccaggcgtctcagactatgaattgaattgacgactttggactcagttcgcgatgtacctcgtgaacttcggcaatatcatggtagtttgacacaccgcctttcagagccgcctcgcgttgttgtttaatctgcatctttgtgagtggtgtacagtcaacatgcccaagggtcccaattcaacaaatggacgcgtctccaagacgtctgcccctactcggtattgaatgagccaaatatcgccgcgttagaacgagagatcactgcacctactgatcaagtgcaactaaacacgttccggctcgtccagctcgtgtagctcccaattcacttgatgacgtacaagagaacatcttgattcagtggaatcggcaggtgaaggagctattagctcttcctatggggcctctcatcaccataagcgcaaaccaaattcttaatggagatgggaacgacaccactgtcagcaaggcatgggttgatcgcttcatcaagcgcctgccagatgatctaaagccacctaaagcacgatcagtcaagaaaaaacgtcttgatgcatcagatcaggagactttggaacattggtatggacgtctgaaagctgtcattgccggggtttccccagaaaatatctacaatttcgacgacaccatcttccaaattggcgagggagtgaaaccccaaatggtcgttaccagtatgggattgggattcgcctctcatcaaactagaacctactgtgaatggataaccaccatcgagtgtattgccgccgatggatgggcagccgatccatttatccttattcaaggcgaccactattacgacgagtggttggaatacggaggagctcccgatgaagctgtattcatggtgaacccgagcggccgggttaaagagcaggttgcatgcgagtggatcgagtgtttccatcgccagaccaaagatcgcactgcggacggtcaatctcgtctcctactcttcaggggccaacctcaatatttgagttacaagttcctcccgttttgcgagcaacacaagatcattccctttagctttccgcccaatataggacatctcatacagccttttgacagcaaacctttcaaaaattacaagcagtattggagaagtcaaggccttattgcttacatgattgacgatcccgatgatgagaaaacagccttcatcaatggcctccctaagatccgtgaggaatcattcaaacctcaagtaatcacggacgcatttgccgacagaggcattgtgccatttgacccgtccaaataggtcaaccactttgagaaaccccctccatgatggcagacgcgctttattatagataggatttcaccaccaggagaattatatgtttcgtatcctactaggtactgagaaaatcaagattgggatgaattggtttgtttggatagcatgcgtggattattacgcgtagtacgcgtggtattggcgcacaaaggataagatataggatctattcattgcggtttcactcgataactagtccagcgtactatgcagatagataccttccgttacaaatgttcctggaacgtgattagaatccgataatagggtgcaatatagaccgaacccctgcttcatattattgtctccagcagaagaatgatcttacatttcgccaaaattatatatcatcacctcattttcattagctgacaaatgtaggatctaatgctccataaatcgggcttaatctgcacgataatggtagatgtaagattaatgtcctatgcattcaattcggagcattggccttgcaatgtatctaccgtgtctccatccattggctgtgaaacgagtgacatcaccattctaagccgaaaagacagagagacgactaaatcatcagataccaggatctccctcaatgtatacagtaaggggtgagtggcacgatctctgtgcccgatgagaaatctgacaaggcggtgacacttccaattataatattgtacggtgaagtgccaagtgtgtcgatcactggtcaaaggcttcggaagtatgtgtgtcctatacgatgtcgtgtgtctgtagatagcctacatagggaagagtatgcccgatttgggcaatccataagcaggtatcaccacgtacatatgtagacatagctacatgtatcttaatctaagatatagccctagatatatgcacatgtacctacttcgtatgtatggactgttactactttgtgctctaacccgacttttcgccacttccttatcggaggtgcgtggtagtacggccttcccaagtaactcccgcgtgggcttcttccctggatctaatccatcggggaaaattaaacgattctctttcttcttacctccatcgatctctttctttcatctgctttttcctggattttatcaatccaatttcggctgtaaaccaactgggcgatcatcgcgggcagtctgtctcacattttccgaagtggcattagttacccgtgcccgttgcgccccttgtcaacaacagccccgcgaatactctcccaccaacaacccactttgacctggcgcaagcgcacccttgaattttgagctagccttgctctttgccctcgtcaaacctgtcatcatggatggggacgagctgatcgcctcggtcttccgcaagatcgagcgggagaaggccctcatcaccgctgccagtaacatgcggcagtcgaccgacaatcccctcgtgcaacagagagtcgatgccaacattcgcgatggtcgcaagaatatcgcttatttggaggagaaaatgagggaattacaaattcgccagatgaaccaggaaggaggcccggctcccccgcccaaaggccatggcgaaggtgaacactacactcagggcggctctggctcgatgccttccggtgccccattcgccgatcctcgaccttatgctccgatcccaaaggcgcggcccaattacacgaagctaggtacgttcttacatccgttcggaaatgctgcgctgagcttaaattgcttggaatgctaatatgaatggcgatgtctcagatctgatcaagtatgacactccgtacctcggaccgaagatccagctcatgctatcccaattggagttcaagctgagcgtggaaatgcaatataaagccggtattgaaaagatggtccgcttgtaccaggatgagggcgaccggaagagccgagctgatgccgagggccgtcgcattgagagcaaccaaaagattcagcttctgaagcaggcgctcaagcgatacgaggatctgcatgtggatattgaatcgggagatgcgccagacggtatgagaaatataacaattttgctacaagtataacgcgacatggttactaactggtggtacagatgagagtcttagtactccgaacatgcgtaagccgctgacgggtctgctgacaatgcgcatccatgcggtcaaggacgtggaccatgcggccagttcgcgattttctcgaggaccggagacatacattgtcgtcaaggttgaagacacgatcaaagcgaggaccaaggctacccggaacgataaatggctagacgaaagcttttccatggacatcgataaggcaaacgagattgaattgactgtctatgacaaggcgggagatcgcccggtaccaatcggtatgctttgggtgcgcatttctgacatcgcagaggagatgcgtcgcaagaagattgagacggagctcaacgcgtctggctgggtatccgcagataagatgggcgatggtggatcccctcgacatgatcaggctggttctcctatgggatcttcacatggccctggctccggaggacgaccaggcacctcgggacatggtgcacatggacacggtggcgagagctcaaatgctcccccgactgtgacgatcgattcatggtttgccctagaaccggttggccgagtccagcttcaaatgagcttcggtaagcctaatatgcattgacccccgaagaagagaccctatgtgctaactggatatagccaaacaattaaaagaccgtcgtccctttgacattggtcttaaccgtcaaggtgccgtgcgccaaaagaaggaggaggttcacgagaagcagggccacaagttcgtcacccagcagttttacaacattatgcgctgtgcactatgtggagaattcctcaagtatgctgccggcatgcaatgtgcggattgcaaatacacctgccacaaaaagtgttaccccaaggttgtcaccaagtgtatcagcaaagccaattacgagaccgatccggacgaggagaaaatcaaccaccgtattccccaccgattcgaaggcttttccaacatctctgcgaactggtgctgtcactgcggctatctccttccgtttggacgcaaaaatgctaagcgctgctctggtaggcaatattactgacatcgcagcttatttctagtccatgctgacctcctttacagaatgtggtcttacgtgtcatgctcagtgcactcatcttgtgcccgatttctgtggaatgacgatggaagccgccaaccaaattctagagacgttgattcgtaccaagaatcataacaagtctgcctctgttagttctggcctcagcaaccgtacccttcgagcaggcggtcccccggggccccctcaagacaacgctgccctctcctatccccagaaaccgatggaaggaccctacgggtctattcctagacaaccctccgcagaagcggtaagcgctgccactaactccttcgcaaccccacagtcaccaacagctgctgcacaggctgcacagcgccaacagattccaccgaaatcgcctcctggaccttccgccgccgctgccgccgccgctgcagctaccgggctacgtagcccccagcaagccccaggtatgcaactaccgattatgcgttgaagagagactcttggtactaatcaaatcttagctgaaatgggccgtcctatgctgccaccccaggcacccccgcagcctcaacacgcccattatgacccgtccgcttatgccaatttcccgcagcagcctccaccccaggctatggcggtgcagcctgcggcttatccaatggcaccacctccgcagcccatccagcaacagatgccccaacagcaagttgcacctcctatcaaggacgatgctgcagcgcaggcaaaggctcgcattggattggatcacttcaatttccttgctgttctcggaaaaggtaatttcggaaaggtcatgttggctgaaacaaagagctcccgcaagttgtatgccatcaaggtgttgaagaaggaattcattatcgagaacgatgaagtggagagcaccaaatccgagaagcgtgtcttcctaatcgccaacaaggaacgtcacccattcctcctcaacttgcacgcttgtttccagaccgaaactcgtgtctatttcgtcatggagtatatcagtggtggtgatctcatgctacacattcagcgtggccaattcggtctcaagagggcacagtaagtcctacgcttaatcttggttcttttaccggttggaaatgctcacatctctcaggttttatgccgctgaggtctgcttggcactcaagtacttccacgagaacggtgtcatctaccgtgatctgaagctcgataacattctgttgaccatggatggccacatcaaaattgctgattatggtctttgcaaggaaaacatgtggtatggcggtacaactagcacgttctgcggtactcctgaattcatgggcccggaagtaagtgggatcaggttttattatgtctttctgcagtaccgatgagctaattttgtcatagattttgctggacaagaagtacggacgggctgtggattggtgggcgttcggtgtcctcatttaccagatgcttttgcagcagtctccattccgtggtgaagatgaggatgaaatttacgatgccattcttgccgacgagcctctctaccccattcatatgcctcgcgactccgtgtcgattctccagaagctgttgactcgtgagcccgagttgcgtctgggttccggtcccaccgatgcccaagaagtgatgtctcatgccttcttccgcaacataaactgggatgatatctaccacaagcgggtccccccgccattcattcctacaatcagcagtcctaccgataccagcaacttcgaccaggagttcaccagtgtgactccagtgctgacccctgtacaatctggtaagatctttattatctgcttgctgggagataaattttaactaaccgatcctttttatttagtgctttcgcaagccatgcaggaagaattccgcggattctcctatactgccgactttgcttgattccaccgacgtgtgatcgggataattattgctcgcttggacacctgtcacaagttgttgacgagagtgttaattcggttcatggggggtttaatgccgacacgtccggtttcttcagggcgctgcgggtcctccgccctttccagcacttctcgctcttcaaattgcttcaacatacccaatttcagtttcgtttttaagtgcaggcggacctcactgacatgcttcgatcgccggataccatggttaatgaaaccttcaggttgcttttgctttctcgatttctttgtgtgcttatctaaattgcttgctctatttttcccctctcgagttcttttgttctgtctaagttttctttccgactggtcgggtttatgactctattctatgtcgggcatttgatgtccaaaaatggagaaggggcgggttcccatatgggaactgtgtgaagtggttttaagagagtttgatgagaaatgacgaagtttgaagatctatgaagatagcgtaggtccctccagggactcgtgcgcgttatgtccggttttatgttctagcggttcgtggtatgaagagagggagatacaaatacgaaataatatatcccatctgtctattttgtagttggatcacggttttatattcacttgaatctagattcacatgtgtctgcccccgccccttcccagttgagggctgccctacctcgttccttcccaaataggaagccaaacgtgccttcctctcttgcgagagcacccgttttgtttgtttacctttgtcctctcttcctcacctctctacttccctacttcttctttttcaatttctttttatcactgttcatccaaccacttttctttgttccagaaatagatcaagctaccgaggtctatttcgaagatgctgccaaagattgaacgcctgtttcatcggggctatcgggccttgagtaaatcagtcgggaccgtgacttctaacaacaaagagaacctgccttcggtaaacaaagaaccctcgccctcgggcaacaaagaacacaccccaaaggcgagccaagtgccgtcaagttcccaccccatcaggaaatggctcaaaaacgtgataaaccctgtggatgggtctcccgcaaacaaggtgagacctaaagtcgatgatattgacttctacatcgacttctctgagacttcagaatcgagatccaccccggcctggtctaacgagacttgggataaccattagagttccgtgcaactcatcactccccccacggaccggacactatgatccaatcacttccttctccctctcttgctactccggtcctgccacaaccgacggttgaacctactcctctcgaccgtccttccccgtcgctgaacactctttctggcacgattattcagttcagcgaacatggtcggattgtaagttttgtctttataatggcttattacatcactttaaccttagttatctctctcttacagttcttttctcacttacatattactgactcccataccaggcgacctcaaccaaagaaacagccttcttccccgaggatacagagcctcagtatctggctaagcaagttaagctcgagccacaggattctgttacaaaacgcaagcggtctgaggacactgacgtcaatgaggacgacaaatgggactccgagccgcccacctcacctgaatacaatatttctattgcgagtgatggtggtgatagcgataccagcgacgcttcttcatcaccacacgcgaagcgagtaaagagagctgctttacatccctcggtcaagagcggccgctcgattaagcccaaagtcggaaagaccagaaggaagaagaagaagggaacatgggattcggataggtcaatgtctgagccaagtgacctcgacgagagcgaggaagaatacatcattccgacaggagagcgcgatgagctgctcaataataagctgacccgagaaagagcaaagcgcctacttgaagcagtagaactcccccagggccacgacctgtcaccagacgaacagcggactgctcatcaacttcttactcgtggctgcatgccaactatccaccgacattgggagaaagatttctccacccttccagagtccctgttcttttctgggaaagatgatgaaggtcaacgtaatgaatccaactttatccttgaaaacgataaatgttccgagttttacgcgatccgcgcattccaagagcttttgaagatatgtggtaatgtgagggactattgcaatatccttgacatatgtcctgcaatctacatcaagaagtcaatagagaagtacttgcgctgggcattgagcgatgccggtgtcagggtccagccgaacacaccccctgtgcacgttatctatcgcaaacctcaggacgaagagccaaaagaagcctttaatagagttgccaaaacattggaggatctatcgaatacctggcagagccaactcgctggaccccatgatggtgaagaagcctggccggcattgatggggctcgttctctgtgggcctgttctttctgtcatctctctggacaccaatcccaatccgcaaaccctaacacacggaatcaagttccttggtcatttcgacctttcagatttcgataatgatgtctggaacaccctggctatcgcgatcatcgtcatgcacatcagaaggaccgtgaccaaactcgcaaaggcctacgatcacaggtttgtggcctcgatctttgatggccctgccatgaatttcccggatcctgatcgttaattctcgtcatgctacctcgagatctatgagactctctggctgcaactacttttagcatgtcacacagagctctcgaaatatatatcaaacaaagcttgggaagggaacagtatccatggtcatcctcgaggattcctgcgaattcgatcagccgtaatcactccgggtttagttataggcatgtctttctcgggaattttcgaaccctcgttagaatctagcgcttgagtcatggccaattagttcactgaatgacgtgctataaccttttcctatacgtagaacaagaattgtcgtgcctcgtgtctttggagtttttttatcattagatttcctcctattgtgctatgttgatagatgataggttcacaattacgaatggatgtatggcatgccagtggagctcagtccttgctatgtagaagcactattgccaacggaagtgtcgcgaccaatgcaaggattgattcgtcaaatctccacttttgttgttgaatacttgtttttccctttctgttttcaatttgaaccattcttgtcattgcatcccaatgaactcaatataaagaacaatatagtgtgttttcacgaatccggagaactcccggcgccctaaaaaaatcttccacaatgatctccgaagaccatgggggtatagaatactccccgttgctgcgcaacatcgatccagaagcggcagacaattccaagaagtcaggatggcgacaggaattagcgattatctcgcgatattcagcccccctaatgatatcgctcctacttcagcatgcattgaccggctctagcatcttcatggtgggccatctggggaaacgagaaattggggccgtgagcttggccaacatgacttcccagatcactggatattttgtctttcaaggcctatcaacatgtttggatacgttatgtcctcaagcatatggctcagggaatttgaccttggtcggccttcacgttcaacgcctgacgcttttcatgatcgtcctcacaattccaatcggggctgtatggtggaatgcggatcgaatatttctcctcatcctaccgtctgaagcccaggagacagctcttcttgcagggctgtatctgaaaattgccatcgcgggcgctcctggctatgcttgctttgagtccggaaagcgatttttccaggcacagggattattcagtgctagtctgctagttcttgtattatgttctacgttgaatattttcatgggctggttatttgtttgggtatattattcctccttagaactccccgagccatccactgatttcccgttcttttccagagactgcaatggggcttcgtcggtgcacccatcgctgttgcagtcgcaaatagtcttctgcctatctttctggcattctacgccatcttcattaagggctctgagtgctggcaccccctttctgccaagatgtggcgcggctggggtccaatgttgaagcttgctataccgagttggctaatgatcgaagccgaggtccttgcgtgggaaatcatgacactcatttcgtcccatttaggtgcgactgagctcgcagctcaggctgctatatcgacactttcagactttgcctttcaaatctcattttccatcgccgttgctggtggtacacacattgcctatctgattggagcaggtctcccacagcgtgcagcaacatcagccaacgttatggtttttgcgtccttcggtgcgggcataacaaatatgcttgtgattcttgctctgcggagcgtcatccctggcttatttagtgatattggagaggtctggcacttgatcttctttttgcttccagtgggtgccgtccttcaaattcccgacgccgtggccacttccctcaatagcttgctgcgagctgtgggacgaccggatctgggtagctatgttcagctctcgatctactacctcgtcggattgcccctgggcattgctttagcatttggcctaggttggagcgttttcgggctatggtgtggaatttttatcggccaatcgatcattgtgttgatcgagggtttttatttctggaaaatggtggactgggcgaaggcatcccgagaagctgtagagcggatgtgatcatggaaagagagtttcaaaagccatgaaatatatcatggcatgtacgacgaatataaaacaacaagcaccggccttgttatgtttttggttagactttttttccataatattctcttaagagctcaacgggaaaaggtgtataccctctcctaaagattcttttatctcttgtttacttgtaaatctacagaggagttcgtatggtgagcgaaataacaaacctttatatacttatgcgtcacatgaccggtcccgctgttgacgctattcccaacaccgcaatcttcaactgcatcacccagcattccaccatggatgccgccgaggatcgagacgtgaagcttcaacgggcctctggggatttggtgtccgagttttcggcaaagctgcccttgctactgtggagagcccaaactaggactcccccccgcaccccacgtaaatgggcgcaggccaccaaaacagagaagcttgttagccttgtaagatgcaccacatagctccctcttgattacgtctctgtgtgaatttactgatgttatctgcagcttgaaccctttcaagagtggcctcaactcttagatccacatttgcagacattactgcctcctttagtggacgcttttctagcatatctgatcaagcaccgcacccaatatggctctgtttcgccgaagtcatcccagataggaaaattttatcccctaccaagagctatctgcaggctactttacactttttgcaaagtccgtggcgtcaaagtggttagcaggttcttgaacaatgagccgaaatatcttgattcaatgattcgggccttcatcgaatgggatgaggtcagaccatccaattccgaggaattggtcgaatccgacacccagcgactcatctgggaagaacgctatgtgatgctggtctggctttcacatcttctgcttgctcctttcgacttgtcttctttatcatcagatgacattccggtgccctatgacaatctgcaacagttggcttggctaccatctgaaactcctatggttgctaggtcggttctttccttgtcgttgcactatattggtgcatcgggcaaagaacgcgaggcagcgacagcgcttttggcacgattggctttgcgtggagatatgcaagctctaggtatgcttacaggtctgacgaagtgggcttttgctgtcatccagccgacggagaatgtcgaaccaccatctgtctatgcttgtattggagtgctcacattcattgctcgcttgggtgcatccggccaggtagaagactttgctccattgatcaattatgtcttccagcagacttccagtgtattccagggaaattctccaatctctgcgacaatccagtcttcggcgttggctaggaaaattgttgtcaagatccttcgcaacatcacaaccatggccttatctttgaatgagcgaggtgaccgccacatcacggatgatcagttatcaaccatattggaagatgcaatcgatcatttcttggtctccttggccgacaaagatacgcccgtgcgatttgccgcgagtaaagcactcagcattatcacattgaaattagaccctgaaatggcgactgaggtcaccgaagcggtcattggctcgttgggggagaacatcctcttcgaaactgatgatggctccctcgtgactccatttgaagcacggaagattggtacacacacccttaagcgtaatctcagtgcagtcgatgcccagcgatggcaaggattaatcctgacactgtcacatttacttttccgccgggcacctcctattcaccaactccctgagattcttcaatcacttgtgtcgggtttgtgcttcgagcaaaggtcttctactggtggctctatgggaactggtgttcgagatgcggcatgcttcggtatttgggccatgtctcgaaagtatacaacacaagaacttcttgcgttgcaaccccaggtagtggcgtcacaatctggcaagaaggaggtcgatgttctgcaaaagctggccgtggaactcatctgtgctgcctgtatcgatccgtctgggaacatccgacgtgggtcgtccgctgcgctacaagagttgatcggtcgtcatcccaataccattgcggagggcattcccctcgtgcaggttgtggattatcatgccgttgcaagacgttctcgtgcactaattgatgttgctaaagcaacagcctctttggatctgatttactggagtccgcttcttgaggctttgatggattggagaggtattggttctccagatgccgagtcccgaagatatgcggctaagtctattggaactttgagtactcaggagttattcaaaaccatgaatctggttttagagaagttgctgcaaatgttctccagcatctctcgacatgatgtggaatctcgacatggctgtctgttatctattgctgccacggtcgatgcctttacctcacaatgggaagcatcaatggagaatagagataccccggaagccagggctgtttcatctcaagttgccaatatctgggatatctttggttctgcatcaagccctaccgatgatgacttgaccttacatacttcacgccccgagttgacagcagaggcatcatcttgcttgatctcctcactatctcggtctaccaccataacaggcctggctcaaccttcagaatcacttctgaaccgaacactgcacattctgtcgctctgtgtttctcggagcgatgatatctcgattgatgcatcttcgaccgccttggcacagctgttccctctcctatcgccatcaaagcaggaagaaactgtgcgtacttggttctctcatcttcgtgattcatggagaatgccgacgggtcggggtcaaattctagcacttggtacagtgttcaagcaactcgcagcacaaagtgatgtccaagaaaacatcgtcaccgagattcttcattacaccgggaaggaagaggttatcgagaaaagagttgctgctgtgaagtgcttggccaccggtatcttgccatatatgggtaatacttcttgttcactagctggtacgaaaaaggctaacaagatcttagctactactaatactgttgcaagcaactttgtcgatttcttgaatgattacaccactgacagacgaggtgatattggatctcttatccgagtcgaagcaatacaagcagtcggcatcttgcttcgaagagagttggaaacaacaccacgctcaccacttattcatgatctggttgggtgtctctgccgccttgcatgcgaaaagctcgacaaggtcagactacaagcatggctctccctgcaggacttttgggaatcagcagcggatctacccccacttgaaaggtaatcttaccgataaagcaattatttgatgacggtgctaacaaaaacaggaaatttgagcacttcagtcatgtttcgtcacaagattactttgctcagttaattactctacaggatgttgactggcttcgtcttcctttgttacaaggacttgctacctctgctatctcgggagcagaaggtctcgtccgagcatctcgctcggctctgacccagttcctcaattctcaatcccaatcccgacgccaggaggtattgatggtcttcttgcaggatcttgctacagttctagatgacaaccttcaagatgaccgttttgccattcctgcagtcgagtttgttgcattcttgattgatagttacattcctgttatcccggaagcctcagatcctaggtttgtgaccttgtcttcgttgcttatatatctacatcattccctgacatcttctttctagtttccgaaagttgttcacgctggtccagaaagcacatttcagatccgcaaatatagctcgattggaagctgcagtcaaagtttatgctgcattatcaaggattgactcgttacgagggggtgttttgaagaagatgaccgggctgcttttgcatcctttcccaaaggtacgttagatctcatacgtatggatttacggtactgacagttgggttttaggtccgatcagccgccgcagaatacctgtttgttgtgactgactctgaaattgtcaagtatgaagactggtctgtttcgcctaaacagctgaagccccaggtggataatttgaaggtcgctctgtctttgaaggggtagcagcccacagaaatgtcatgaaactcaaatatgcagcgagttaataacaacagctgaaaatataagatacaaagcatggatggacatggggtgtaaaatctttgggctttggctgtgatgagtactagtacttgtggctgctgtgccagtggcagtacttgtaccagtactcgtggtggtacttgttgtgctcgtcttgctcgagtgatcctccgcaaagaaatcaaatatgtattgagtggcattgaattccgacttacccaacgggcactgtgcggcatttcgggtaaagtcatcattgccaacagtacttggccagcaatggccattgtcactctcacggtaatgctgaacgatgccttttagcccgttgcagtcccaagaagcatgcttcacgagcgggtcgtcaaagacagtcacattgctggtgggctgcgcattgtccgcacatccattttgagccgcccaggcctgcaggacatcaatgacgggcagcttagcatccccgtcgccatcgataggcgccgtcgtgtcaaccgtaccatgaaactccaagaaaggatacccctcatcccgcttagcgggggcgcaagaccccacacccttcatgtcggctgtatcataccaggcgccactgacagccgcaaaagccgcaaaccggcttcctacggtggcgttgcaggcgatcacgctggtgaaaccaccgccattcgacttgcccgccgagtatactctggttgtgtcgatgcagagggtttcttccatgtgcgtgagcagatcgttggtgaagtccaggtcgttgggacgcgacgtgtttgcataagggctggagagccagtatccattcttgctgtttgggtagatggcaattccgtcggggttgaattccgggtttgagaattgtgacagactttcttcctctaccatgtcgcgccccgccccgtggaaggagaaatataccggggttggcgtgttcttgtcatagctggtaggaatgtatagtctgtattcccggtctgtgtttgggagggagagggactcgcttgatcctgctttgggatacttggaaggtatgtcttcgccacagcccggggttttggctatgctgatgctcgtgagggctgcgagggatagcagcgatgtgaggcgcatattgtttggggcgggtgcccaggtggtctagtttcttgagggatacatggcttggcttttatatgggactgggggattgattgagagattgagggattaaggactgaaagatttaccaatacaaaccccttagcctgagcatataccacggaagcccgactgaggaacgaacagagtggatccgaggcacccgccaagactccagtgccacgggcgatctcttatcttttcaaaccttacctttgcgcccaacacgcttaaatgatcgatctacaacaacggaagtcctcgggtatgtatgcgaattattattgccttgaagattagaagccgagaataaacaagacatgaagatccatggatgatctgtccttagtgagcgcttaagattatacccattgaaactttattattcttcatgcatcgaagattggcttcacccatgccaaattgggacatgctaattaaagatgaggaagatcaatggatacagttcaaaaccagataatgtgagatagtacgcaggagttatacccacttcaatatactctgtactgaattataattaggtaggcattggttttagtgtacagtaacgggtagaatagaatatgaaaaaaaaaaagagagcaaatagaaaaataaaaaaagaagtgcatcatccgtgaatcgaacacgggcctcgtcgatggcaacgacgaattctaccactagaccaatgatgctagttcatgtgatgtgaccaattattatgcaagatacccctatctcccttccaatctcatttcatccgcctctagtcaaccagaagctcgacctcgctggtttctagagctccacagtcgcaaacatggctgccgtctcagcagctggtattcccccgaatgcgacgtgagtactatatctacatgctatgtccccatgctaacaagtcttcacagagtatatgtgcgcctgtccctcccctccatcatatcaccactccgctcccgcattaccatactgaccgattgcttccccctattaggtcaagaatctcgacgagcgaatcaagcttgagcagttgaagcatgccctggaggagatcttttccgaatatggcaccattctagaggtcgtcgcaaagactaacctcaaagctaagggccaggccttcatcgtctttgacaacgtcgaatccgctacccgcgctattgaggatatcaacggcttcgatctctttgagaagcctatggtgctggattatgcgaagacacctagtgatgcgacagtccagcgggagggtggcagcgaagagctcgaggctcacaagcggagacgcttagctgagaaaggtacgtttaacagataccggcgcactaaatacaaatactcaatccgtactaatgattgtcgttttacagagcgcaaacaagcccacgaggccctcgaagcacagaagaaactcaagcgtcctgctgccgccgtcgaacccgcacgcccagccaagaccaccaaaggtgccggtctcaaacccaccgctgccgctaccaccgctgtcgtcccagacgagtacctcccgcccaacaagattctgttcttgcgggaactaccagaagacgcaacccaggaaggtctgtctgctatttttggccggttcgaaggatttcaggaagtcagattggtgcctggtcgcaagggaattgcattcgtggaatacgaggccgaggctggagcaatcagcgcaaaggaggctacatcaggcatgcccatgggcgaccagggcaaggcgattcgcgttacctaccagcgacagtagtcgtgggtggtttgttgcatcctacaaaatatcccggtctcgttctttctggcgtttggaaggtcttgtctcaagtacatgtgtattagaaatacggagagctttatggctgtcgtcttgctttcgcaatgcgtcaacattgcatatcacatgaacttcaatattccacaaagtagatgaaacgagtcatagggctgaaacgagtatgagcatataacgtggtacatgtcacggtcaaaaaagaagatgtgaacaagaagagtatcaatacgaaacaaaatagcagcctagaaaatgacatcgttgtcttcctggtcacccagaacatctacggtatctgcctcttcaacgaagagagcaggagaagcagctgccttggggtttttcccttgctcttctgctgccttttgccgggccgcgagaatctcagcgtcggcagcagcaacgtctctctgcttcttgcctgagactttcttcaggcggtagaattcctctcggtcgagctcatcgagttcagagttgatgtcttcagaatggttagtctgtgcaagggacgctggagatagatggtacaaacatttgatagtgttctcggtccgaggaataataacatgctcactgttgtatatatgttagtatcctgaacaaggaccagattcacaagttccgatcttacatagcatttactaatcacgcaagttagataccagccgtaagccgtcacagtccatgagaaaatgacttacctcttcggttgacaaccttgatcacttcatccagaatcaagaaagcagtctggcacaattggtgagcaatattcccatacgctacatagataccacgcatacctgtaagcttgccaattccaccaatgtctccacggcccgtgcatatgtctctcgacaacgttgaatctgctgtcctccctttcctagccctgtcagaccgaagtcattgacaccctcctgcgtgtagctttcaaatgtgggtagaagaacaccagaaacgttctcttgcttggttcgcacgcggaaacgagcctgcttggcagactcctgaatctggtagccgatatctccgcctaccgcatagctcacttccgccagtgagaaggcagcaatctgcatgacccgacccatcttttgtttggcttcatcgatgcggcgtgtaatatctgtagaagtatgattagcgtcttgatagggtggggaacgggaatgtgtcgcatcataccgcggaaacgtctgtgaacaggacagagagtcagtatatactccaagaagcaagagaggcacagggatctgactttgttagagcttcactctttctcttcagtaaactatggccaatttccgcgcccttcagcttgttcttcatcaaccccaatgattggcgagtcggaaatactgcctctcggccctaaatagacgtcagatgaagtcaatatgcgggctcagttccacaatagactcaccacagcgccggacatgattgcagcagaacaaatatcacgatatagtccttgttgttcagcttgagcaacacggccacattcacattggtatgacgccgataaagctccaccgcccacctgatacggatgaagcacgtgatataatcaatgtgggaacctcatccgtcaacagatttggctttctacgcgcatgcctgcagtctcttgtttatgcaattttcctttatgctgacacgttgatcgtgtaattggatttcgctcgactgagtggcgcaatgccagggacgcttttgcccccgagatcccaccggcagcacgcagagatggatcgaccatctgcgtcccggccggacctctacttgatcgtgagttttgacccattggaccatttgaactggaagcttacttgcattctaccactagactgatcaagacatcatttacgaacaagatctgcttcgcgacgctagtagtgtcaagccatggcttgcctatatcgaattcaaacagcaaaatggcacgctctatgagcaagcatttgtacgtcgtcacctaccacaaccgagtccctatggatcataactaatataatggcattcatcaggtcatggagcgcgcttgcaagcagttgccgcgttcatacaagctctggaagatggtaagtgacatttttttttcagaagaacttctaagtctttgctcttactgaccttcgtagtatctggagttccgtacaaagcacttgaagggccgcaatcccatggtctatcgcgccgaataccagaaagtcaacgcactcttcgaacgagccctgatcctcctgaacaagatgccgcgcatctgggaaatgtacctatcattcctgctccagcagcccatggtgacccagactcgacgaaccttcgaccgttcccttcgcgcattgccggtcacacagcacaaccgaatttggagactgtacaaaggcttcgctcgggctgcttccgggcagactgccattaagatctttgctcggtacatgcaaattcaccccgagaacgtcgaggattacatagagcttcttgttgaaaatggtgaatatacggaagccgtgaagaaatacatggatatcctcgacgatccacgattcaagtccaaacatggcaaaggcccattccaattatggtcggagatggttgatctcctggtctcccaggccaaaaagatacagaccggccctcaggtcggaatcgatgttgatgccattcttcggagtggcatcgaacgctttgcggaccagaggggcaagttgtgggccgggttggccacatactggatcaccaagggtaacttcgagaaggcacgggatgtcttcgaggaaggaatcactactgtcatgacagttcgtgatttcactctcatcttcgactcctatgtcgagtttgaggagtctatcattggaagcttgatggagggcgcagcccttcgctctgacaagggtaaagccgacgaagatgcagactttgatcttgacctccgcatgctccgcttcgaacagctgatggaccgcagaccattcttggtgaacgatgtactcctacggcagaaccctaacaacgtcatcgaatgggaaaagagagtagcactctggggcgataataagaaagaagccatccaaacctacacggatgccgtttttgcaattaaccccagcaaagcacatggaaaattctccgagctttgggttaattatgccaagctttatgagaacggcggggacttggataatgcaagagtcattttcgacaaggctgccaaagttccattcaagtctgtatctgaactggcagacatctggtgtgaatgggccgaaatggagctccgtgccgagaatttcgacaaagcagtcagcataatggaaaaggcgacacaggcacctaagaaatcgacggtggactacttcgatgagacactgtctccactacaaagaattcacaagagctggaagctatggagtttctatgttgatcttgttgagagtgtttcgtctctggaagaaaccaaaaaggtctacgagcggatcttcgagcttcgcatcgccacacctcaaacagtcgttaactacgccaatctcttggaagaaaacaagtacttcgaagaatctttcaaggtatacgagcgaggcttggatcttttcatgtatccggttgcattcgagctctggaacttgtacttgaccaaggctgtggatcggcaggtcggcattgagcgactccgagatctgttcgagcaggccttggaggattgtccctccaagtttgccaagtctctttacctgatgtacggcaacttagaagaagagcgcggtctcgcacggcacgcgatgcggatctacgagcgtgcaactcgggcagtgtctgacgaggaccgcttcgagatgttcgaattctacatcacaaaatcggcctcgaacttcggtctcacatctaccagaccaatctacgagcgcgccgttgccgcgttgcccgatcaggaggcgaaagaaatgtgtctcaaattcgccgagatggagcgacgactcggcgagatcgaccgtgctcgcgcaatttatggccacgcgtctcaattctgcgatccccggacaaatgctcccttctggcggaagtgggaagaattcgaaatcaaccatggaaacgacgatactttcggcgaaatgattcgcatcaagcgaagtgtccaagctcaatacaagtatgtgacccctactactataaaaccgataacacgttttctaacattatccacagcaccgacgtcaatttcattgcatcgcaagccattgccaggagccagcaactccaaacaggggagcaaggcgaaggtgacgatgaccagcgacgcgcagatgccatggcagaattggagcgtcaagctcgtgccccagttggcttcgtggctgcctccagcggtccggaggggggtaaccgtcctccacctaccgcccaagaaccagctactgccgaggctaaccccgacgctattgatctcgacatggacgacgaatagagggagaagttgatatagggtattttgtcaagaggaagggaacatttgatgaagttttttcttttttactgactcgatttccgatatctttgttctttctgtgtctcattcatcgagttgtatgttgtatacctgctatctctatgcattctagtgtgaatgttttttttttgcggttgttcgccatctcagttcccttttctctgctcctaccacagcagactgcatctcaaatcatgacttgtctttccggttggttgttaaaacatgcagcttgcggctctccgagattttctgctcgattttaccatatttctgtttggatacctgattcaccgtggcgttctagtgttgtatctgtatttgtatagatttctcaaaggaatgattcaactgtgtggcagcttgttcagctcgacgtgttgtaactatgaaggtccattctattggcgaattctaagtcgaaccagccttgacattcacatatcataggtaaacagaaacattggtcgcacgcagcgccgatcataatcgatctatatctacatgtggaacatttgaccccggcgctattctgaggtaaatgtaaaaggaacaggggagccaagatattaagaaaaatacaccatacatccacggaaatggttcagtacttcttaggaggtactttcctctgcctcctgaggagtgtggctctcggtattagcatcctcctttccttcttcgccgtcctgctggggcgcaatatcttcgctcgtctgctctgtctcagtagccttctctgtctcatggggctgctctggggatgagacggcagagcgcggagcaggcgtttcaggctcgttcgcaacatcggggaagatctccaagaagagatcgggcaagaagcggccaaggcgtttgcgagtctcgacccatatttcctccttgcttgggtcttgggatggggacacaaggtagcctccatcagccattactaggaggatattcttcaagctttcggggactgcttctgcctacgagattgagaaaaaagaatttgttagatgggagtggtcatggtatacttgggtcgtcgggtagaataatcgacttaccagactatcgccctgaccactgttcatcatgcgatcaaggatgtccaggatcctgagccagagagggagcatacccgtccggttggggagctgatcgaggaagcgcaggaagatcttgcagaccaatgttgcggcttggaatcgggtctcgctcataccaacagggtcggagtggtagacctccggcttcaaaagaagtaggacgagcgggaataggacttcatcgaagatgctagtccactcctggtcatcgcttgagatcagttcggcagatagaagagatcgctgcagcgtggaaatagcatggtgtcggatatcgcgacacgggttgatgcattgactggtcaaggactggaagataggcgaccagtaggcagcccaggctagaaatgcacctattagaaactcgttgcagtagacatgtcagaggatcgatcgttaccttcattctcctcaagatgagattgtttgataagagccgggactcgtccagtcagatgatagatcagaccgattgccttgatgccgcgagtcacaacttggttctcactacggaaggagaagtaagtatcaacaatggacagaggtgcatggtacccttaccttgacttggattgtttgacccccttattccgacgggcctgagcatcccggtgtcgttcctcgatagaacccacacgcccggcgctgacgaagtcattggccaggctgactacgaactcatagttgtcggctgtgataatatcgggcattgactcaacaatgctttgtagaagatcaaagacaagagaagcgactgcctcgtgttgatggagtctttgcaagatcgaccagaaatccggagaaatagtgatctcgtttcttagacggcctgtatgagcaatgcacctagcaagacccttgaccgtcgccacggccacggtttccaaaatatcctggtcgaatccagaaatagcgtggagcacaacgggtacccggataaagtgttggtcctagcgtgggatcagtaaaggagaacctacatcaaagccacagggtaaaggagagtacatacatggctcagccgcaagagatttaggaggtaagaaacaacacgagacacggttagcggatggagattcttcgcatcgcgcaccagtgtttgaagagttgttgccaggttttcaccgagaacctccagggtcttttcgtcacgaagagtgagcaccgtcgccaactctagaacgaatatcatcgaaggatcgtatttaggttggttagggtcagctctgctgttggcaacccttgacgttggtgtcgggcgttcgggttttacgacaatgactgctggtgcgttctcctcgggaagcaacgacagcaaagcctccacgagcatttccaatgaggacagaggaagagatctgcggaagaagtcagtatcatgaccacaacccatcaatgaaacatctttactgacttaatatttgtcaaaatttcggatattgagcaggcagtcacacaatccactgtgcagagtgtgttgtcaagttcttcgtccgaaggctcaggaggatcgtctgccgcataacttgagaggtaagatgtgaatgcagacaaaattcccgtgtcgttgttgcgtccatcccgatcaatcacctgtgatggaggctgtagcggaattggagatatttcaagttcggacgtgagtttagcgtcaaacggcgggatgagagagttgatgaacaagttactcaatatgcggacgatatactcccagccttggttgacagttgactcatttgttgagaggactcggaaaagcaccacagttgccagttgtgctctgaagtctcggccaaatttgacggctagctcgcttaccatcacactcttctgaccaacctgaacctctgtgttgagcgctgtactaggaggtttgctagtacccaaagtgctaatcgatgcaagggagaagacgatacggtcgaacgcctccgtcaagccatagcgggcagcaatctgggcacactggtcgaaaccattgaccacgcgggaatatactgcatcatctgatgcagacatgaagacatatgagagggtcgcaatcactggtttccacgtagccgcgaacatttcggcatcatacatgttggtctctcccactatgacgtcgccggcagatgaagacttcagcaatagttccttccaagcatagtcaaatgcatgcttgttttcgtgttcatcgggtagaatgatttcgttattcttgatagagtcatagatatcctcgaggaattcctccgcgaagtctccacccccgttgacgcctcgcaagttccttgcaaagccagcgcaagtcatacggttttgtgacttcacgttgcggttgtagagatcggtgttcagcatgatgatggcgtaggtcaaaatgtatagtgcgtctttatcggcgatgccatccggcttgaccttttcaatgtaatgttccgaaaagatcgtcacaattcgctcaatgagcggcgattcaccaggcaaacggaatgaactgagtagttcccgaagagcttccactgcactacgtccctcgaagtcaaggagatccacaaatgcgcctagcaactcctcgttgccgcgtttggagatgtattctccgaggactttctttgacaggcgtgtggtgcccttcaagaagcgagcaaccagaacgggattattcgcgtcctcaataacaccatggctcacaaggaaggcaattcccttcttaggatcctcattgaacatctgtgcccccttgataatgagtttcttcgtgtggcgttgttttttcaagctttcttgaggaggataatctccttgtataggctcgttatccagccgatcatggatgaactgcacatagcccaaaagggaatcgagacataacgggggtacatttgtagtgctccaagttgcagagtctgggaaagcattgcgagagagcaatccaatcatatcctcgcacaggtcggctcggtccacgtcacaatcatagttgacaaaaagctcaaccataaagctaggtatgcgtgacaacatgccaatgctctctaccattgcctctcgagcttcgggccttcttgatcctccttcgagccccaatctctgtcgatctctaacaggaacaggtgtggctcgtccgctattgggctgcgaagctggctgtttcaccaactttggtgattcaggaattccttcgtagagcgatgggtcgatgccaggttctcgcggtatttccacgcgagggtgcaagcaggccactaaatatgaaagatagagttcctgctgtaatttcaaaactggccggcaggttgataacaaggtgccagctactctcaacgaaccagttagaatagctatgtgttctgacctgactagctgaaagaggtatcgacaaagatcgtccttagccagggcagccagactgggatgccgagcaatggaaggacctgctacttccaaggcaacatcaataattcggagtgccatcacacgcatggcgtctgtatgttgccggttatgagggtccaacaggtcgatcaagacacggaataattctttgatggatggtaaggagtagggctgaagctcggtttcgggatcatcatgcgggctaggtggtgcagtagctgctgcgataccatttcctgcctgctcgggtgatccctctcgactagtactatgacgttctgcggccgatgtgtctgcgctgatggctgacaggtgctgcgaagtcacggtgtctccattaaccgacgggtccatcttcagacgagagggtgggtccttttttgtatcttcgcccgcaaatggatccggtcctgcgggcactccttgatcaagatgcgatagacgcatgaagatcacctggcacattttgaccattgccatttcggcggatctccgaagtacctctgacagacgaccctggcagcacatgctcaaaccagtttccatcatctcacagacgctctcgtcgcccaaaagttcgccttcaggtcgtgaaagtatgccctccatcaacttcagaatcctcaaaaggactatctcgtccgccgacgagtcgctggcctcaaatcggcagtgtgtgatcgcggctgatagtagctgcatagctacagagagccgtggggaattcgggttgataatattgtacgagaggaacttggtaatggagaccaaggcgatagaggtaattgcggcggaggtcgaagaggagcgaacgacctgtaggaatggatgaagtaacgctggggtatcaaaagttcggatatctttgcaatctttcagatcactccgcagtcgtgtaaaggccgatattaatgggttgtcctgcatgctcttccccttcttccctcgcagaccccaccgattagccaggacatgatcttcatcgggacgaggtgacggttgaccagtcctgcgtggaattggacttgagggggcagagttatcccgctcataaacacgagaggctccattgccgcccaggatggcggagactgaggagtgagcccagcgtgcatgcttgcgcatagacgaggtgacggtgatacattcagtggtcaccaaagccaccgggtctatggcaattggaagagaagacgagtccatagtgggatcgagcatcacaaaagatgctcgctgttgtgacaccattttgaaggtcgaacgaaacagctggtctcttgatcatcatactgctgcttgccttatcgagcttagcgtcttccccgcccactcaccgcctacgacaggggctgtactgcacattaccacacaatctgtattaaactgattggactggatgaaaatctgcaccgatgcggtatcaatgtaccatctggtattagactgcatccatggatccaaaatgtttgatttcacctttgttgacatccttctatgccaattcaacactacatgccattatagtcagataatcgcagtataaaacgtgcaaatacgaggtaaaaagccaatcagaagcttcacctacatcatgtatgcatgaaatcatcaacatattaaaccggcgatcatcgatatagtggctgatatatttcccgagtaaacaaagatgagattttcgaattgactacggacattcttcatgaaacgagcgtattaaactgtctagaagataatggcattgtccctcagaccgaattagtattcccgtctattcttgtcctaaaatctaagcttatatacaaggatctgaaagcgtgaagaataaacaaggtgcgaagaaccccatatattcagcgaattatgcagatgtgacctgtcacactgatccttgcagcggttggggatcgcaacgatagcaacggtgttgatagcgttggccggacaaacatagtagagtaaacattaaaaacaagagtgcgggacaggtcgaagtagagaatgtaattcctacaacctaggacatcgggctaagctgggtatccatattcaagtcattcttttattcttttactattcttagcgtcaggcgctaatacccactcttggtctatcgggctatcgcgatatcaacccaccgcttctctgtccccgcgtctcaaaacaaacgcctcctctcgatcttacacttcatttacttaccttctggagattttcattcggatttacgccactgcacgtgcctactccctgaatctatgaattgagtggatatctttggtacctcagcttctatggaggggagcgcgaatgtcgcaatcgctttaccaacaacaggataacacatcctacatgcgattttcaactgtctctcactgctcagcataggaaattttctctcatttaattctaaacattacgatcttgtctttcccgtcactcgttatcttgctactccaacgttccttctgcgacaaaccccggcgcatttcatttgtttatcgcacacggtagcgcttgcccaacatcttctcgcattctgcacttgcattgcaagtgcaccaccattcgctatggcgactatcgcacctccctccggaatctgtacactggcggaccttcctctcgaacatctcagcctctatcacgtcgtcgacccatgtttatcatccatcttcgtcttctatggcgccgtctctaccgccaatgctacagtgagcagttcccgtattcaggcccatatattcacacccgccgggtttcaaagttaccctcggattacggtgtccccggctgcccccgtgtatgctgcggtcaaccacctaccccgcgaaaaacaaggtgatgaggtgtgtcgtggacttgcagtcagcatgctgagatattttgccgagctgtcggagccggtgaagcaccgtctgactggggtggctcgcactggaagaccgggaggaaaggtccccaagatgtttgatgagatgcatgctgcagatcttgccaaccgtatgacaaaggtggatgattctttggagattattcaggatattcggagcgcatatcaggaacgcaaggtaccatgggtcgacattgatgtggtgcttcctacgggtactatacaaccattccaacggcgagagagtatgggatcagatcttgagggaggtcagaatccgcagtatggtccatacacacccctgatagaggcgttgggagatcctatgtttttgccaacagctcgattgaagcgtgcgccgtcccagccgaccaatgtcagcaaatcacggctgttcgcaagaagccagaaagaagctcttcgtcttaccatgtgtgagcttgtggataccgaagagagatatgtcgccaaactttattctcttgtgcatgaagtggccgacgagtttcggcaaaaggccgtgggcagaggaccatccagcaacagccccgacgaggcagctttggcggcattattcccaccatgtttgaatgaaattctggaagtcaacctgggctttctcgatgtcattcgtcatgtgcttgatgaaacagagaaagatgccatcacagatattggtcaggacacggagctgccttctaatcgtcggggtttgccaagagatagatcggatccgcttggaattctggcattcgcaaaggccctctttgaatggctaccacaattttcacagccatatggagactacatgcgagcacatacaggcttcacgcaaactctgaattcgttcatgaaagataagaattctagcttttccaagagagtatacgaaacgggagagcagagactgcgctctctgttgatggaacccgtccagcgactacctcgatacagtctgctgattgacaccatgactagcaatctgcccttggtccatcctgccgtgcgaactctgctaaaagcacgagacattgtgaaggatatatgtgcgctagagaataattccccatcgagccacacccaaagccttcaacgcctccaagagctagtcaacggatggccagcgaaaacattccctgaaggtcggctgattactgcagtcgatttcaacgaaattacccagccgtaccgtctagacacacagtcatctggcagaagcagcacagggatcatgcttctttataagaactgcctagtccttctagagaaacccgccgaaagccggactacggcacgtggtctgctggctgatatcgacaatgcggccgcttcaaccaatgacatgtccatgtctttgccacaatccgaactccaggttgtgcaggtgctagactttcataacgtgcgttgtatgcaatccacgtgtggtcgaattttgttcgccgtgccaatttcagccaagtcctcaaaagaagagacaagctctgacctgcttgcattggaactggctggaacgtatgaaggaagagccaatcgactgatcgaagaaatatccaaggcgaagattgagggtcgattccccgagagtgaaagagaaggaggtaaatggacgctaagaagccctcccaccgggtctgcgagtaacgtgggaatactcgcctgtgtgtgcgaggacggtgaaagtgccgcgctcgaccagattcaggcatccccaatacgcattgtttttgatacatccaaggcgacctgcggtcaaatgttgagaggttccaaccttgaggtcatcatatcaatatctcctccaaatggagatcaatacagactagatatcgattctgtggttggatctgggtctacagatttgatcacggtggacacatttatttccactctttcgcgacgtcgtaagtgaccctcccttgagaattatatttcttgccactgacataagaaacaaagttcaatatttgctctcgcctctgcatagcgcccgaaacccagcattgacgaactcattggttcattctaattttgaaattcttcggtacatcgcgagcagcttaatcacgcaggtcaagtcttcacggggcttccggccaccttcgccgaccaaactaatctcaaacctgttggggggtagccgtgataatgtgcccactctcaaggggccagggtcggccactcttaccggcgaattcccaaaaatgcctccgccaagagtgaatctgtcgagatcgaacactctaccttcggcattcccaggaaaagacaaggacaaggacaaggaaaaggagaaagagaaagaggaaaccgggaacaggatatctgtcgttgggacatctgcctccaagggattggatactcagttcgggttgctggagcagacatttgcagcctatgtgctttctctgcagtctcggagtggaaacattctgggtcgaatgcttcgggtcagagatcacgttgaccgggcgccggtcaatgagctctacaatattttgctagaagacccgagcagaattcaggctgccgccgaagtgccagttgatacgctttttgtcgctttcgaaacctttttggcgaatgcttggagaacaagtatgggccccgtcttgagctcctcttctctgaaatggattcagagccagtttgacaccatgataccgcgggattttgatgagcaatttcggaaatttgtgacagacatgagcccgcaaaatagacgagctctagctgcgattattcgactacttgccgagctactcgatgcatctggaaatgacggagatcgcggtgctttgacgatggcatttgcggaggtactcaccgaagacggagatcctagccatcatgtctcccttttggaccgactggtcgaagactttgacaacctctttgaagaatttattcctgggggtacctcagtggaaggaacactgacctgcgatcaatcgaaatcacatgccaataccgggtcagtcggttccaattcttcctctttccggaaacgcttcggcttcggtatgtctagagatactccgaaaaatgaaggcgaaagcaaagtcgcagcaattctacggacattaagcaagaagcaaagcccagccggctcggagctcaatacgcccaagggttctttgatgcgctcaaagtcgactgatgtggactctcgtctgggcttccttcgccctacatcgcgcgatcgtcctacatcccgtgatcgccctacatctcgtgatcgccctatctctcgcggtagccctgcttctcgcgatcggcctttatcccgtgaccttccgtatcgtccgtacgggtttgcatctgaggagcaaatctcgaggccaggcactgggtacgacaacccaccctctctatcttctttccgaggattctctgaggatagcgtgcgaagaactcgcaaaaaaagaaggagctccctttcggatatacgaccactcacatcatcctcagatgcatccagtatctctccaactcaacagctccgcccgacgaccccttccagtcgccctcaaggagaagtggtaacgcccaccaaccagtccaggcctcagagcagttacataccaacaccacctatgcgtggtcagtcaccaatgcgttctaggccgccagcaaaatccgggtcaccgacgcgactaggatcacccattcgccgtctgtctccgccccgcccttcgacgccgagcaggaaggagaacattgatcccagggctccacagatggagcgtgcatttaagtccaggggcagtgtatcagaatcgccagccgatgagtcaaggaggagatcccaaacgtcaggcatcccccagcggattccgggccttcgggagcggccaagcagcaacgcttccgataccaagcgaccacaatcctcgtctggcttgcaaaaaccacagaaaccgcggatgcaaagcccacaaaaggttagtcacattctatttctttcgataatgagttgactgacatcccttagttacgcgatcgtgttcaactagaaaagagaacccaaaactctacccaattgggcctgaaggacgagctcacggagcttggtaacgaattacgttctctgaagctcacaccaccaaggaaacccaacgcaatgaacttggagtttgattttgaccgtacagacatcaatccacatgctgctaccgccgcgtcccttgaagctcgcatgcgcaatcttgaagcccgatttgagacagttactggggaatacaagtgccgcacatccgctctcgagcgagacctggagtcgtccttggttcttagcgagaagcgtgttaagaaattggacgagctttatcgtgaggcaagcgccgagaacgaggctctctatgatcggtttaataccgagctcagcaagattgcgaaggatgtccgattgggccacgcagaagacgcgttgaagtctcaactggcaagtgccctagacgagatcggccgagtgaagaaagaaaacttccgcttgaaacgagaagtcggaggtcttcgagcccagtcagctgccgctgcactgctgaaggcgagcgagcaatgaccaaatatacagcatcgagggcttgtcccaccatcattcctttcccatattccatacatggttactcaacaacctgacacctgtcacattatctttcctttcaccttgtaacttgataccgcacaaccctcttctactttccttggaacgcctattcatttgcatacatatcatgagcctttcttacttgtattcattcctatttcttgtcacccttcatactggcctatccgcacagatagccatttgaccatgcatgcatagctcaggagatcaagtttttacaaggcttgctttttgtgtgtctaagtgttgttgtcatgtacactaagcctcttcggcatctttacccaccggccagcccatcaggcatagtgcctcagtgtcaatcattttgtacatccactgccatttcagtttccagcgacagcgtagatgtaccacttccacctcgttgagagaagaatgcttagctgaatgaccggatagtcgatagtccaaagtcggcaatgccagtttttgccaaaccttctgacttggaggctttcctggcttagacacgatgccttcccttgataacacaggtaaagtaaagcgcaactgagcaggcgcttcagcagacaagagagccttgacgtgctcaaaagtcccgggcatttcctgtccggcagtaaaatccttatttgtttgccctcgcggcctcaaattagccgcatctttgcgtatccgttcgatatcaattttattgaacgggcgtatcgtaacaggaagacttatcagttcatctgctagttcgttgggatcacggtcgaccggaacgagacgaagccgcatccagtaccggttatcccacaaaacccacggagtaaaactgccactaggcgaaacgttgacttgggtcacggggtcacgatttttcatgaatggttgccgggatagcaaccagatattatcacccccgagccgtggatcgtgggactttccaagtctggaggcttcatttgggagacgctggaacagaacccccgctaccgtgaagccttttcttcgtttctcgtcattggacgtggcgcttgcgccatgagagccatctagaccggggaacacattgtgaactagtggctcatatctgcgtagcgagaaatggctatcggggaagggagagactagttctgtcatgcggcggagaacgatggtctggatctgccggattcgggaggctgataatgttgcgagttgcgggtccatcgatgctggggttttgtctaggaattgaatgaccgctgaccctgccttggggttgaaatctagcatccggcattgagatgagaggaggtagttggacagctcgtttgacctctgaaggaggtcttggcttgaccgaagtagggagaggatggattgtgattccagcgcacggggtagggagtttgaggtgcgaagactgcggatggcgttccggggagtgagggttgggtcgaaatttgttgggtcggagacgtaagggacttgatttttgtggcaggtctccagaagacttgttttggcgaaggagagtagaggtcggcagacgaatatgcccgggcttgccatttttacattggatatgagattggtgtgagtgttacctgttctagcggttgggtcgggagaagtgatgtgaccatgtgtctggttatagaatcggactttggcttgtggttttgtcggtcgttttatggggattgatgtagtcgaccagctttcagaagcaccgaagataccatggcattcggggattcgagcaacttcaggaatgccaccaagacctaagccagttgctccagccgagagccgcaaaatggtggtttcaatgttgtcatcttgatgatggcctaagagcaatgtttcgagttcgaactcataacaagctatgccaagggcttggaaacggagacgtcgtgcatgtgtctcaaaggcggatggcagaggccccgatgctccaggctttggcgacaattgattctgacttgagataatttcagaccagtctaaattaaggatatgtgttctgatgtctgttcaataatggttaaacaatcttctaagatgcaaacattccgacttggaacatacccatatcacgaagccagccagcaaccttttgtgcctccatagtgctttccggacgggaacgatgatctaccacaaaagcagtgacagaaatagctccagcaacatcataagattgctccagttgcttgcataggtatgctagagccatagagtcggcgccaccactgacagcgattcctaccatcccgcgcatcagctataagatcttgagacacaaacagcgagtctatatttttcaatatttaaagcttaccaaacttccgtggaagctgtagagtgtcattatcaccgggattctttccatacttggcgctgccataattgaggcgagcgcgtcgcgatctggaccacgcttgctggaaacaacgctggaacaaaaccggcgatattgatatattgccggccatgtctattctccattggaatcaaacatgggctcgaaaattcaatatcatcgtcgacctatagattcacttcacgcggaggagagagaaccttagggtgatctcgtcggctcggccaatcaatttttccgagaacgtgaccagacggcctttacacgaatacgtctccgagattttatcagttagtattttaaatagtgacaagtcatttttgagatgtttgggggaaatatgtcgggtttctgatgctgacagtggcgtaagtggtggttactgagttccatatgttgctcgcatctaacaatacgagatttagccggcccatgtccttttgtatagatatgttcgacggcggaaaaggggaggaaaagcctgaaatgtgcaaatgacgtttcaatatataaccttgtaagtgcgtgatcccgagatctcatacatcttcgactacagctcgacctcgaattcaccatctagaactagtcatggctaaagttgaatcctaacccctgagttgtagtgtaatccagggaactgggcaggcttaaacctgagttattacatgtagcagattacatatatagcaatcaaccgctagggtaacctctcgagatgatcataacaacaatcggaaccttcgataatccctgcagcggtatatatacgatgccctaacaacgttgactacagcgacttcaccacggcacgtgatatatatataccctgatcggacaaggacgggcttgttttgatgagaatctaccattctatctgttcctttaactatcgcttcgagggaagatcaataggagaagattacctctagttcgacgtttgatctttggaccaacgatccaggaactagtcattggcagacgccatccgattgatcaatcttaaccctggaagaatacatacattgataatgaattggaaatataagttagaaaaacaatttacatatatcaatttatttgcaacaactcttcccaatagtgggcgcttgtgaggtatctagacgacagaaacaggaagaggttacaggtacatcagccacagcaacggctatctccaactgcggcccaataatgcgtgcctcatcattccgacccagacgtatcaaacattcatggtagccctgcaaagcccatacgttattcggatgctgacgagcacgaataagagtgccatcaagacccaggtcagcctggtagacagccgctgcatcctcgacatggccctgctctagcaaaagagcagcgtatgcatggcgggtgggctgcatccagctccagggctcactgtagcccagcccatcgtccaattcaatcgagcgacgtagatgctcgaaggcctccgtgtagttcccacggcggtactcgatctcgccgtccagcatttctgacgccacccctaggatatcgatacacttgttgggccagtccaagcgcgtatccggcactcgatctcgcgctgcccggtacagctctcgctgacgctctgcatccggcacgttccctgttgctgcatatgccacgcccttggcgtagtgcagaaccgctatcgtcatgcagtacagctctggatctgaggggatggcaatcttgataatctcgtcccacatgccgaaccgtatcatgatgtgcgcgcgcacagacatgaagatttcgatgtagtcggccatggccgagagcaattctttcggtaatgtcgcctccatgcggtccacagcggcaaatgcggcctgtttctggcccgcaaacatggccgcgtagatgagggagtggtaggtgtgcatgcggtagacggagtagaaattaaatgggcctttcagcgccaggtatttctcgtctgcaatcgcggcacgttggtttgcgcggacggcgcttcgatagtctcccaccagcacgtccagatgggacggcatatgattgatatgacccgcgtccggaaccagatcgcggaggtagtcggccggtcgcaggcctagttctggaaagggcgacatctcaataaggtgtatgtagatgtgcaggagaccggggtgtttggaggcgtccttatgtttgagagcggtctctagcaccttttttgcttccatggtacgggtgcccggatttggttttccggtcaccatgtcccacaacttccagggcgtgaggctgatcaaggaatcagcgtacaaagcgaccacgtccaaatcatcgctaaacttttcatatgcctctttcattgcatcggcatatgcaatattctgaatggcatattgatccatgctcgcaggcttatcactctgatagcgggcggagatggccttggcgagggcctgttccacggcgttcccattttttacagacaggaagcgagctttggttgcggctcgatatgtgttttccacgacggccgccaaatcgttgccgaggaagtcccagggctggttgtagttgggaccgagagagtaggccaacccccagtaggccatcacacataatggatcatgcaccaatgcctgtttgaaacagacgatggattccttatggttgaaggaatatgcccacacgagaccgcggtcaaaccatatttgggcctcaggactggtggtggtgatgaccttcccgtatgcccccagattatacggatattcgacctgggttgatccttttgtcatgttgctgatatatgccctggtgacaccgtatgatgttggcgggaaggtgaaggagagaatcttgacgagttcgggtttaggcggggttcccgctacttgtacccaacgacttcggacttgttccaatttattttatgttttatgttttatgtgatgctgtgaatctaatgaactattgaactattgtgaactatgcggtctatactgcatcttattggattcccagtcggaatgcaaatgcgattaggttgtactagattgtactattgttagtagatcaccatgtacagccattagaccacgagatatgattgcttttttctcttctttttattgattgattgatctctttgatctgaacagaaacaagagacgtgaaaactatatgcaaatcaagaatgtatggcagttcagcctcaatgttctgcaattcctattttccccgtcgcatcagcccacactttgatatatccccatttttttttcttcatcacatgttgcaccccaattaggaaagacgtctttttaatagaaagggagttcgtacttttgaaaccacctgctaagcctgtcacttggcttatttttgcagggatctctggccaaggcgtgaatacagggttagacacaatggcacatggttcggacgattccaggtatatatcgccacatcagagtagagaccccttatattaactacaaattaagttatgcacctcctcattgacatggcaaacgttagtcagcgcgctagcagtgacgtgggcccaataacacctcggcaggtgacattgctgagaaatcaaaggtggcagtcccaattttgggtataggctagaccgaactataagaaaaagcaaaataccattagctgacttgttgtcttgaagccgcaacaatgctagtggaaggatctccaagcctattttttgtcaaccaataagaacgaagttgtacattgccatcacagtgatctgcgaggtatatagaaaataggccaaataagccggctaaatgtgagatatcggcataataaagatgtgcattcctatttgagacatcttgcagatccgagccaatcctctgtcgtgcactctaggcagacgcttatcttgggtgtctttgatactcccgactactccgtatactttccccagacctttaaccttcctcttccctaccctcgaccgagaattcctgcctccaacaaccagacaccggactgcaacccccacgctcccccgtggaagagcccaaataccgaactacaacctaatcgcccgacatggcactgtcactgtcagcttcacttaaaacatccctactaaactgcggaaccttgatcagtgaaagactcgaagcagctccattccagaccttcctactcttggcatctgtgtggatactctctatcccgactcttgtgtttttgatgacccgctactggccctcgtttaactccaaaaaggccaaacctgaactgcgacgctcgcgcgagaacaccgatgccagtgagacccctgcggggacccctattcaaaccccgagtgagaataaggattgagtcatggggcgcaaaacgccacatgtaactacggggctaggtgggagcaacaccagttcgtcgatcgctctgtatcagccctgaactcggtagtctattttggatttcctggtgaatgggaattgttattggttgctctcatgcaagttcagtctaggttgttcccttcttctaagctaaactcatttaagaacaccttgcatgccgaaggcgggatttgccgtccacattatgcgggggatctacgggagtatatacaacaccggtctctgctttatatactttatattgttattccccgctttgacgatatcatgtcacgaatctttctgctatactctgtaccttaatcagaaataggaaaatgcagtataccaagtggctgtccgcagtcagaagaccttcattgccgggctttcattccctagaactggtatagtatcctccgtaagcttacccgatctacctgcctcattcagtgttatactccaacaggactcggccgagtcgaatacacaaaggaaaagcagccttcctcagcgcctctcaactagtgctggtccagtagtccaatcctacaaaggcaaccgtctcattagcacgagataggagtataccaagtaaaccccaacggtgccatgtctctcctccatgtgtgaatgtaacccaatgcacgcccagtttggagtaaacccgtcagcagaagacaccctccgcatgggattgcctcttcggtcaaggcattctcctcgacgaagtacttccttttgacagctcgagcagaatcccagatctataagaaccccgagaaagaacggagcaaagagagcctcctacccgaccataccaagcaatcatcagaatcatccaacagaaaccaaacacttctccagaatcttcttcaagatgatctccagcaccatcatcaccagccttatcctgggtctttcccagctaagcactggcattgcactgccctcaaccccacccccaaccccagaacccggcttcatcatcaaccacgtagcctccgactacttcccaaactcgaagggcgacctgagcgccttcgacgtggacgtccactacgtgggatattccagcgcgaccgaagcctggctcaccagcctggacccgcactcagccaccagcgacgaagagaaagcgcgcatcctgaccgaagccgcgtacgcgaagaaatacgacgagaacgacgccgacatggccggcgacgtggagtcgttgctcgcgcacgttgccgggaacgtcaccactactaccgcgggcattgcgaagcggtcgaccttctcgactagcgcggcgcatgctgtcctgtggagtgcgtgcggtacggtgttctcttgtattgctggtacgacttgtcagtttgatctgcagattaacagggccccgcgtagccgttgcgaggcgcagggtggctcgaactgctgtgttagttggtcgacttataatgtgcgggctgggttcttctcgagtacttggacggcttgcaatcaggaggttcaggccgagcataagattaatgcttcttgtgagggattcgggacttcggaccagggtggtgatgtttgtctaagcaatcgtgctactggatgtacctaggttgttgaggatgggaagttggggcagaggtggaggatgcagaggcgggggatgcagaggtggaggtggagaaagtggtgttgctataaggaacagggtgatggttgttcaagcttaggatcatgattatccatatgtagtcatggaatgcaattgttgccctttttcgagagccgtcaggatcatatctgatatgatcgttgcatcggggaaatgtgtaactacatagttagtaccccaagctctcttgggtgtccggttagtgcagctagtcaggggccattaacggagtttacaacagaataggctttgaaggatccattgattcgattcttcgccaatattgccgggaacaccggcaacattaatacatgagaatgcaagctgcaagattgaggcaaaagcaaggcccaaagctacagccaagtaagccagatgcgctaacacccagaagaagagaaacaggagatgtgatagacatcaaaaaaatcaagatcaaaatcgaaatcaaataactcgcccatatgtactacaaacccatgcatgtagcattcattgcattggggtaggctgaatatcaaatgtaaaatttgaagagaaggaaaaagaaaaaaaagaaaaaagaagccaacgaaaggtcccaaagactaggttttcattaggtgatagcagagcctgcgacagaggccgagttggtcacagaatggatactcccgggtggtgcatgtgcgtggctatccccgttcggaatgtgggtttcttccacaaggacatggttctcatcaattcccaggagagaccggggcgggtgaatctctttcttgccatttgtcttgtagtagagaaccatgtctccggaggtgcgccagaggtgcgtgcgaatcgttgctagagtcatgtttggtggacacagctggtggatgaagattagcatgattggcgacaataaaatataggagaaaagcttacagtcttctggcagtatagctcgagatactcctctggtggcataacggactccggttcatccgggttagcagggtcgatgcgctctgcgacataagcaagaaccttctttgctcggagcatgcggttggcattaagacgagagccattgttattagtgttcatatttcccggaggggcaccattgggagctggcctggatgaataacgagattagtttcatcaacaacacgcattccagaagatccaaaacatacgggtcgggtttgacgactggcggcaaggtatcatcgaaaggcttcaatacgaaggcgatcttgacctgctccttgaagggaatttgattctataacgaatgatcagtaagagaggaaagaaaatgcgagaaaatagacgtaccttcagaagaagctcaccgagccaatgaggaattgatttcttaaggctttcgaggtcttcaccaacgcggcccacggtacctctgtagagatccgaggcaacggcagtatcgccagtttcctcctggatgaagactgcagtccgggctgggatatccagtcgcggagtttcctcctcagaactaggagaaagagccgtctccaactctcgatctgtatttgtagccagaaattcttcataatcgtcacgaatgcggtcaacgacgccacagagattgggctcatagaccttctcttccttgatagaggagatctccgactcttcgaccttttcttctaatatctgaggcttcgtctccgtagaattgcgacccaacttcttggggaagttcatttggaacttttttccgaatagtgacttcttccgctcttccttatcaggctctgcgggggattgaggaactcctggagttgcatccgacggagacagaagagacttgccggtgtcggtttgttgggccgctagaggccttttcgagaagtagtcacttggtgaaaaggatgatgccccgccatcgacatgggaatttgttagccccgaggcatcaggtgtgtctggttcaaatgcggggaacggagagttgctctgcatggaagtgctcatgtagtttgacgatggtgtgccaacattgatgccaaagccgatgttcgggctaccagggaagtctgagctgggacgcagagtcgacatatgatgaggattcgatatcggaatcccaatgctgcgagggacatcatcgccagatatcgaggtagtcagcggattcagtcgagcattttcttctgctctcgcgatggcagtttggcggtaatcgttgtctcgtcggacttcctcgtctactaccagagcgaacagccagcgcaaaatccatttgccgagattgactgcgtgttgtcagtatggcaaagaatatccgccaaggttgacagtagagcagaataaatagtcgtaggaaatactcacttctttgatcatccctaaattgatacagctcagatagtggtagatcgatctcgtcggcataaacttctgcgtcgaaacagcgattgggctctagaatgactgagagcctgccagtgcgtacgttgatggcacaccaatgtccgatactatcaacggtgtttacctctgactcaacatcatccatatgacgcttgccgaaggtttggacaggaatacactagattcatgttagtcgatgtcttatacttctccggctgagatgctaaatcaccttcagcaggtcccagagaacaacttctcctgccgaatcctgagtaagtgtgcgcctccgatcattcaacatcaagcacttgatcaagccgtgttggccttcaatggtttcctcgggctgtgaatgaaccggaattgtcaggtcaattgtcgccaagttaggctccgaggaattaagtttaggggctgcgccaccaagaatcgaggtcgctgataactgcaaaagagcattatatggaaccttcttcggtcccttctctggggttgcgggctttgcagcagagtctatagtacgtgctgggtcgggggccggctcgatccccactgtgatgtcaacatctcgccagcggttgatactagacttgggggtagctgtccagatgtagtctcccgccgccacaaccttgacaacgccctcgtgctcttgtagtgcggcgacgcagaggccctggtcgggatcggccgatcctcgcatgtcggtcttcgccaccaagccggaacggtcactcgagtagaagacagagagatcggggtggtccgagtaaagagaccacacgctatcattgtgcatggtcagggtgttcatgcatcgacccgctgtgagagaccagatcttgatcgtctggtcagacgaccccgtcataattgtgtcgccggactggttaatcataatagcacgaatgttgtccgtatggcccacgaacttcgtcacaagctttccagaccggggatcccatactcggacgacattctcagggccaccgctagcgagcaccgacgagaccgcacccagcgcatagacagagcctttacacgaggagtcttccccgccggcattgatgttcaatatctccccgccgccattcaaatcccagaggtaaaccttttgatcgagaccgcccgaggcaacccaagtagcctggctaccggggctcgctagggccttcacataatcggtatgctttccaatgcgctccgggacctcagttgactcggagtgcgggcgccagagtcgcacggtcgtgtcggacgaggccgaaacaagcgcggaattgtcctgtgccaagactatgtcgttgatccaatgactatgtgcttggacctgggttttgaagacggtcggacggggcttctggccaggagacgagagcgcagacgcagaggaaagaggaaagtcgagatcccaggaacagatgacaccgtcgcggcccgcggagtagctaggagaggggacgtcatattagtatccgtgcaatccacgtgtaaagaagcctgatttccggaagatcgcgatcgcaaacttggcacgggttcaaaactagatcatggatcccagcactagcataacgggggaaagatacttacaggatggagttctgacggtcgaccgtcaagccattgacccccaaccggtgcccaccgggtgcatcaggcagagggaggactagagtgagagacacagtcagcgacgtgggggtggatacacaggatccaacataccgtaggtgaccctctggtggcttagtttgcgtgccatacatgcagcgttgaaggagtgaaaccaattgcggagatgcgaatgcggagcttatctgtcgaggccgatcgcacgttcagttttggtggggaaagtaaacgtcagagcattcgcgacgatcaaaagagagaaagtcaaaaggccaaggaaaaaagaagcgaaggggaaaacagtcaaatgaggggaagttcagagttggaggcgccaggggtccggagtttatgtgtttatgtgtttggccttcctatgtgatatccaatacgaccttcaagtagaaatcatgagattactcgtctttctccattatttaatagcccgggggcctttcctttccctttctggaatgcttctcggttattttaacgatttgactacatctataagttccatagtcttctatgataccagatatactttttaacaagatacacaatacataactatatattatgcacatccacaagactcctcgtttagaggaacaatccttcagccctaccaatggggtactgacttgcccgctccgaatggtttgacacccggagatcagatttgcgctcagtctagtcaattggatgctccactcgtctcgtatggaatgagacttaagctcgtgcagaacatacggatagagcagcttggctgcatcgccaagatagggcttggtttggggcttcgagaaggctgcagctcgtatagatttgcagaacatctcacaccctaaagctatacgcgtcattctccgtaattgcacgaatgctcatctgattccagaatttcagctatctataagccagtgcagtgggttgaagggtgtaagtatacacaatataaggcttcttttatgttaccgatgagcctgacttcttcgctgattagccaggaacgtctagtccatcttatagatgtgcatctttgattcacgagtcgccaagggcgttgccccaagccttgagcttgcaggccatgatttcatgcgcaaaagggagatggaagaactattagctgtcgagcaaatcccggaattgggctgcttcaagccgagagcagtcagagcaagtaagaagaatgacatataattgctcaaacaactcgcttcccagaatctacagaatctatgctcttccaaccttctatatagcaaaaatatacaaactacaaggccaagaaaaatccaatcaaagacttttctccgcctgcgccgcctggcgtccctcaagagtattcgaagcatattgatagctcccaaggaaaacagccccaccaataccaatccacgtcacacgcggcgtgataccacgccagaaagcaccgggcccttcacgtgcaatgccgcgcacaatctccttaacacgaacaggcgcgtcaacgccacgccgcgcaagcataacccgcgtcttgatcacgtctagcggggtagttaggccagccgcaatggcgccggcaacactgccgaacatggcgcttgtggtagcgggaatctgcgtctcggcgagagacgaggccgtctccgcggttcgcaggtaccgcttgccgtaagcttccttcattgactcccacattgtgaactgcagcacggtgaaggggatctcgcgggcgattgtgatgcccgcgccgcggtagagctcgcggaagacctggctgtagccgcgcttcggtgctggggccgagggcgctgtggttgtacttgttgggaccgcgtgccgcagggacaggatgtccttcagtgcaaggagactcgagccgccgaagaggccggcttgggcacgctgcttaatgacttctgttgggacgcggacggcgcatgcggcgatttcgccgagggaggaggcgagtgagtgtgtgaggattatgtgggagcgggattgggagttagttttgctgttggcagattgaggtacgagcagagtccgcttgacgctatcgtagacgatgaagaaggaggcggcggagggggcagagccaaagaggacagatgggaggccggcatagataccgcggaaggtttggcggagggagacacgggtttggggtgcggtgtggtcgcgtgctttttggagtcgggttttgatggtgtcgagagggtagagagagcagtcgacggttaagcctgcaatcgcgccggactatatagtagagctgttagagggatactcccggagagagctctggagaagcttacaattaatgaccgcgtccacagggaggagaccaatggctccccgtcaggttgggccatttttgaatagaattggatatgaagatggttctatcacaagaacatggccaattggttggaaaagtaggaagggagaacggcaacgacgtaggttgtacagcagcgtaaacggagaagctccgcggatatggctggcagtttcttttgctccgcggtcaggccatccgatatcgccgatcttcgctacgtccacttcaaaagaatttatactatcgtagggtcgacgtttggattgaaatgtatttactattgaagaaaataaagctctttcgcacaagcgtggggcattgacaaaagaatacccccaaaaaaacacgcactgagacatcccacaccaagtctatcagtaccatccatcgtcaagccagagccagtgctccgttttccctcaacatcttcacaagagaaactcgagcgcgataaaatgtcacagaattttattgaagaatatcaactcatctcaaccatggccgggggaatgagggaaaccgccaaatcatctacaatactcgtagggaatcacacactgaacgcggaagggaaggggacaaaagtgccaccccgttctcaaaggataaaggggatatatagacacgaggagaagttgatacaaagaagggatattatttggccctggcagctttgctggccacggcaggggtctgggcggggggctcgaggacgtgggtgtggccgggggcattgataatttcaccagtcacgtcctgtcggcaggcctgaatgttctttacccagtcatccgccaggacctcgtcgagagtcgctcggtttttcgggttggtcttcagcatgcggccaatgatgtaccggctttcccgcggcaagatccggagaagtcgccatgggcccttgatgacctcttggcgctgcccagaaggctgggttgatgtctgaaccggcggtgcctctttgctggtcgttcgggtgggccgatcatgggcgcagttgctggtttggctgatctgcttttgagcagtatcgggaggatcatcctccctctggagggggggttctaatttctttgcttctgcatcttcaggtccgtttccattttggtccgttccagactgatcaggtccgctcgagcgaggggtcaaacgcttattgtcctgggcttgggaaagaagatctggtgtcgacttgggccgacggcgtggctccggttcaggaaccggggtgcctggggtcgggctggaaacgaacagcttgtatgagttgtcggtcaggcgcggttgcttccatgggaaccggcgcaaggtcatacagcagaagatgatcgccagcgaccagacatccgtggggcgagggtcatatttcttctcgtcgtagacctcgggagcaaggtaaggatcagagccaacgatacctggtcatgcaaatcaataaccaccaacggcgaacaaaaaagatacaggattacttacctgaagcagggacaatgtcgttctcaaaaggatagcggaatacgacggcacttccgaaatcaataattttcatgatgccacggtcgttcaccaccacgttatccagtttcagatcccgatgggccagacccatgccatggatgtacgccacaccgctcagaatctgcttgaaagagcaggcgatctcctccttgcccattttgccggtcatcacgatggcaaacagatcgaacggcgcatattccatgacctcataccagcgactgccttcttgaatgatatccaaggtctcgatgatattgccatggtgcaaggtggagccaatacagaactctgcagtcaccttcttggagtattccttcaagctctcccagttgtgacggtctcggaattgcttgactgcaaaggtgacaccgtcactgttgcgcttcaagagacgcaccgagccaccagctccagatccgagcactctgcccagctttccatacttggaattcagaccgtgatcatcggcaaagggaacattttcggtagccatttgatacggagtggactttccagctgatggactcgactttttaggcatcgatgtcggggactcggatcgcttgttgcgatggcccatcttgaagaatcgtttcaattcagacatagagccatgatgctggtggccgtggtgcttatcgctaccgtgctccttcttacttccaaatatgctccgcttgtcactaggtttgctgagatcactcgcgctactggatcggggagccgagggacgaaatgaccgtttgacatcccgaccgctgaagataaagcgaggatccaactgggcaaggtttttggactggggtggtcgcttatggcgcgcatatggatcattaggttcgcccacaggggtcatagtcactggcggagtaagagactcctgtggagtcgaagggggactttcatcttggggggtgctcccgtcattcccgacgaagaattgcgcacgatttttgggtacttggatagcatgaggagctcgctctgagccttcactttttctggtaggctcggtggactgagggcgggaggatgagctgggttgaggcgtgctgttcttttcggttgatccgactggaggtgacgcttcaggggtgaaattagtgtccgcgtggggtcggctggtagctctcagagaagaactgtcgctggttcggccttcgcgagaatgggttgcagctggagtaagagggggtgactgtacagcagaggttggaggagacggacgcggcgaggcaaaggcaccggtgccatgtccactacgatcactcgactcgcgagatgcaacctatgaggatccaaggttagtatgatgacgatattgccacagtccattgagtctccactcagcggcgtcggattgtgggaagtgaatatcactttaagcttgaagggattggaagactcggaagaacacccgacaccaaaaaagagagatagatatggacataccctggaggaaggaagagacatggggtcaaaggagaagtttcgcaggcgggactcctgaagctgtgcgccctgcatactcatcgccagcgaccgtaattgttcctcgtccgtaggtcgcctttggtctggctggtctggttgctctggttgctctgatacaggggacaaatctgatcgacctggttcaatctcctccgcgatggaggagaaacggacttggttaggctgagctcttgacttggcatcggcgtcaccgggttccgaggcctggccggggatcttcgcggggttgtgcatactttgggattctagagaggtagacgtgcgtcagacggttggcagggatatgggagacaccatcacaaccgatcaacacggcagccaagacatacctgaacccatggggttggtgggtgttggatcagtcatttcagacgtcatagtgttcgcagttcggcccggaacgtgggacacatgcccctcacggtgggtgagttggagaatcctagatagcgaactgaaaaccagttcaaaagctgtcaaatgtggtcaaatccgcagaattggacggtttcctcccaaacagagcctaaggagtcaaagaccgacgcaagaggcaaatcttttccctttttaacttttttttcttccgccgaatgcgatcgagagcacccgggtctggttcaggaatccgggaatccgggtatcccgggtctaaacgagaagatatgagaagcggagatggttgagggaagaggcaaaggaagtaaaagagaaagagaagaggggagatgtcagggtctgggcctcaggcaaacctgggattttgggggcgagtggggtgggagggagggaggaagacgacgaagaagagagatagtgagggagtggtagtttgtctgtctttgacctcatttactgcatttaatgccctttttttcgtttggcctatttccaatttaccagatgagcacgataatatgtcaaatataccccatatttacccaaactgtccttgaaatgccttacctcataagtcggatggccgcggagagttcaagatgatgtcgacccgtgccgacttcccggaggcgctgaccagacgctgaccaggccctacgtactcccaagccttgctacgacgtatggagtactcatgttgtacatcggtaccctctgcaggccactggacgatgggtctttggatctggaatattgcctgaacgggcttagtatatctgctgactccactagattccctttcctctccgacatcgtaaagggccaggccgtctttctccgctagattctccagactccatgccaagtagcatgtcgacattatgcagtgacacattcagggtctacgaagtcacacacatgccaagttctccgctccgcagatcagttggagtctgtgacctcatctgtaggcttccggtcacttctcttggttgtccagtcatcgccgagaagaggtccacgggaaaaccggggagggtcttagtaggcgtgtgatcacatgtcagcccatttcaattgcattgtggtgattagttggtctatatttgactttataagtcactcttgccgccgcttgcgtacggagtagtatatagctttcaatgtaaatatctcttggatttcaacagatatagacaatctggaaaaaaataataatcggtatcgtacaacgggggaagaagaaaccccaaatttcccagaaaacgcccggtaaaccgatccaaatcaaaacaagcaggccccctggagcactgtcggaatgaccaataattatacaagtctattgtccttgtgatgctcagggaacgacctggataccaatggacttggcctgggacatgacactcttgcacaatccctccagggacaagcctgataaccgcgtctcggtctgcttaagcttggcgatctcataaacgtgcttgagggagatcttgccacaaacatcgtggccaggattcatcgcaccacgcagccggttcttccggggttcgacattggccgcgttgagcaggaggtaagtggtggtcggggtgcgcagttcgaaggagaaggatcggtcggggcggaccgtgacacgcgcagggatcgggacaccggtgttgatgtgagctgtacgggcattgaattcctagagaagtagttaatatacatgaacggttcatataaaccgagtaaacaaagactaaccttgcaaaagtccatggacttgacacctttacttcccagagccggtccaacaggcggactgggactggcctgaccagctccaacgatgagcttcacaaactgatccttggacaatacgtttcgtgccatgatgagaagatgtcgagatggtttccaaaggccacaagcagagaagatcgaactcggaagatttgcagatttgcagattttcagccgacgacgctgattggccagagcgggaagcgagcacaagaaaccccaacgtcataaggtacactcctttctctcctcatcagaagcttctttggcttctaatcgattcatctaaccatcttcatctcgacattcacgatatctagattcaatctctattctcatccgttggatcgaatatctggtgtatctttctcatccggagagtcccattgacatccgaactagaactctcgggccccgcgcgtcgatcttcccttcacctcccttttccttcttctttcttctccagtttttattaattccaaacttatcgaaataatgaactggttaaagtcgacgtacgttccgatcgactcttctctgttgtggttacactgaccgattccatgcggacagtctctccgccgtggtgggcactgaggagcctatctatggcccagaggctatccagtctgttgcgaagcagggcgagaccactcccttctccgatgtgaacaaggagattctgcgctggcgcgcacactcttataccaatgttgaaacccagaccttttacatcatggccgacaacgggacagtggttttccttcaggttatctacagcaacattgtgtaaggaacactcagccggagcttgaagcttccaccatgaaatgaagacctacagcggctgactctaatccttgatcttgattatagtggaattcacaccaccgcccagttcaacgtcaagattttcgacctcagcggaaagggcgacaacaagtggttctcggacccgctctctaacttcatgttcgacgagaacatgatttctttcggtgccgacaacctgtcgctgaccctcaacgaggagggcgactcctactctatcaagtccaccgtcaacggcggcgccctagtggacatcaagttctcccggactgcacccggtttcgtcgtcggcaaggacggtacctcatactttggaaccgaccccgataagccatggggctccatgcgccacgctttctggccccgttgtgccgccgaaggcactattaccaccaaggacaagacctacgacatgactggtcgtggtctcttcatcatggccctgcagggcatgaagcctcaccacgctggtaagaagccctatacatagactgacaaccagaaccgctttatgctaacaaacacacagccgcccgctggaacttcattaacttccagacccctacctactccgccgtcatgatggagtacaccactcccccctcctacggctccaccaccgtcaacgtcggtggtattgtcaaggatggcaaggtaatctatgtcggcacaaacaacacagtgactcacacagaaaccggccacgacgagggcagtgactggcccgcgcccaaggccatcaagtgggagtggagcggcaagacaaccgacgacaaggagctcacagccgaagtcagcggcggcctcggttcgcgattggatcgcatcgacgtcatggccgaggtgccaggcttcattaagagcattgctggcagtgttgccggtactcggccgtacatcttccaggtatgtcccatcttaccctcgtcttgtttattatcaagatagttatagctaactctccttgtacagtactcgcctcaggacaagctgtccttgaagctgaagatcggcgatgaggagatcaccgaggagggaactatgttctccgagtcgactttcatctcgtaaaggtcgcccgcctaattcgcgtacatagtacctcattctcccctgcgggacttgattgttggcgttcgttgtgatggttttcgtgatgccctcatttatgtctagaggatcggtttgactgcttcttcccttatgcggaccagataatccacagactgtatacatgatacttaatgctattttgaccatatcctgaaaatatattagtagtctgtagatacgtaatgaggtgaagagtacactcgagtttcatagggcatagtgatagaatacatgtaggatgtaagtaggcgaaagttactgtgatgtacaggcaagatcagacgttcccggtgctgaccaagaggaaaatgtacaaagaaagatacaaagtcgaatacaatacaattgaactcagaacaagaaatagaaatagaaatccgccagcggtgctagtagaacaagaatacaacccttctaggaactctagaaaaagagttaaacaaaaagaggtacaaatcaggcatcgaccatcaactgctctccttcatcaagaagagtcgtaacccgcgagagatcagaaatcatcttacggccatggccgaccaacaagagcttctcggcattggcagggagacccaggtaggtagggggttcacgctccggcagattgttaacccagacgacgaactcgcgcatgctagtggtctccggcagcgtcaaaagattgtcgttctctacacccgagacgagcttgtagccatcttcgaaggcggcgggtgtaaggaagctattgaccaggttctcgagctgctggtaatcgcctgcgtcgtcgattttaccaccgtacatctctgcgacaagagtgcggatcatctcccagggaatcttctgcggagccacgttggaacggccttgggacactgaatcgacccagtagtcaatgatgtgggctgagcactcgtactgaggggaaaatgttagcgtctctatggggaataaatggatgtagggtacttacgtcgctgtcgttgaactcccagaagcccttccatccaaggcttggtgcatagcggagcctttcctggacgacggcgtgcaagaagcagagtaagagatagacacgggccttttcgactggaggcttgctggctctcacactcagcgaagagagggaatccttcatgttggcacgcacacccgcgggctgttcgtacatcagcacacgcgaggcccggatcaaattgacagggatcttagggctggactccatagataggaaaagacggaattccttgtgtggtttgagagaatccagtctcttctcgagactttgcagccaagcaggcgccaggtggacgttcttgaccagcacccagttaccgactgcagctgcgttgctgatggccttgtccgcgctttcgagaccttcgttagatcccatggcaatgttggcgcaggttgcgcgggtggcttcaacaagagcgtcgaccttgtaactggcatcgaagccagggctggagctgagcgcgatgggcctggttgcagtgacctggtcaactacatcctttaggtcggcaccaccctcgaacagctcgcggccgaacaccgcctcgacgaaacgctcggcactgggaacaaatcggtccatgcggcaaatcttgacaaggagcaaggaccgaagcagttgatccagttgcgacacactctcgtcccacataaccgggaccacgttctctgcaagctcctcgccgaagaaacgatcccactgttcttgggtgacgtttggaatatgctctttgaagagggacatgttggccagcctcgtcatcacttggtcgcgagtgtccacagaagttgaaagatccgcgtcctccactgtctcatccaggacgcggtcgagaatggtcctgtccatggggaatggggtagcttgagcaagcagaatggcaagtgtgatgcgatccttttgaacgagaccaagggaggttcgcttataggtgttgatgaacaagtccctaacaataatctggacacgcgcagcatgatccttctcctgagcaaggcgtttgttctggtagagaacagaattgaaaatatcgacgaaatactgcagagagaactggtagaagtgattgatgtggtgaagttgttctagaaccgcaaagacggcactgcaggaacgggcaatgatgctgtagttctgcgtaacgttgtccacctcgagcataacaccttcggtttgatccatcttcagagaaatctcggcagcctcctttttgagagtttcaagagtttcaatgacattgtcatcatcgagaatgttaccacgggactcgttgagcgcctgcaaaagacgcttctcgagttgtctaaggtggaccttgaactctccttgcatcttgacaaggttgttgcgacgttcatcgacatcgggccgctcgaatttcaggacatcattcaaagactgtgtttgcaagctgctctgggtgacagtgaagttgacgaaggtagttcgactgcaaatatccggcgggaatgtggcagatggatcccgggtggataggaagagcttgaaggatggcgagaaatcgatttcttgcttgcccaattgaatgaggacacgaccaccagttttctggtattccttgttgagaacgtgattgagaatcgggtccagatgctcggcatcctggataaggatggggtttccgaaacgcaacgcgctctccaattgcttgacaaaggaatcgtccaagaagctcgtgacagtgagtttgcgatctttgctttccttctgtaaaaattctgtaatacggccagagggatcaacaataagcgggtatctgttgaatctcttgagaatgatggcgttctctgtgcaaagatcgtcaacgggaagagaatgactctgccaggtcaagcgttcatcggcattagacaagtattccgttatgggattgtgaggcttgaattgaatgccagatgccgccagttggtggacccagtcctcagccattgccttacggaattgctgatcgtaaagaccagcatatgcaaggaatgcagctgcaatgagaacatcgccaacgagagtgctgatctgagtttcgaatgacttgctcccttcttcccagcgcccacgctcagaggacaaactatcaagcaaacgaacactgcggtcgaccttgaattgaacccgattcatctcggtcttgattgcctgcgtctcgctgataagggcagcgtactcggccttgtaggtggcgatgctagtttcgaggtcattgatggtattttcgatggcctgagcttcggccttggtttgcagggcctgctcctcaagttgatccacctcttcacgtagagggccaacacgatcaaggatcgcagagtagttgacctgggcttcaacccattgcactaaaggaccgcaggccttactggcacggttaactcgctcataggtgaagtcttccttcgacaggaattcattctgcatcttagtacggtgtctgcgcgtcatctggcgctcattgtcgtagttaacgatgctggcgatgaaatcatcccgacgaatgagaccttggattgttttccaactatcgacggtgtgtccgaggagtgtgcatacggcttccagggcaagtcggacgctagccggagggttacccatggaccgaacttccgtgaggtgttgacgtttaatgttgctgacactcttctgggcttccaggacagcgggttcagcccgggccaaatcgttcaacacgacttctttccgagttgccacttccttctcttgtatctctaacgcggcctgcacttccaatgaaacgtgcttccgctgttctgcttcttgctgatcagcgaccatacgctgcaatttatcgttcgcttccgtatccttcttctccaattgtgtcttcttctgtgcgagactagctcgaaggtcgctcactttgtcgacggtgtcatgaagcttttcgagaccaatgttcaagtgacgttgttgctcctcgagatcctcgcgcttctcgttgaaaagcttgacatactgcgcaacaaagtcgagataatggcgaggggtgaggaaagtcgtccggccctgttgtttgtggagccgcccattgaagcgatgcaaggagtggtgaataaacaccatggaattgacaacagtgtctctgtgtgatgctgggagagtcaactcgcggtatgctactgggatgctatcaggcgagatgaagtttggtttgtctagatcgaccgattgagtgagctcggagccaacttggaacaaggcttggtcagaccagtcacccatccagttcaggacacaacgattgaacaaggcgggactagtagctgcttttgaagatagaccctcctctggcgggttcatggtaaagacaacgtgcaggttcttaacgatttgcgaggtgaaccacttgtacagctcctcctgcgaatctaggagcaagccttgacgctgggcaccctctttacaagcagtcatcaatgaggagaattcgtcgccctcaaagagaccagggacttctgcgtttgcaagcaaagtattcatgcgttccaggaatccagagtcaagaacgtttgattcatccatgacaaagcaaatcttttcgcctttgcatcctgcccggcgaagaacgctgcgaagatcgtcatcgaaatcttccgaagagtacttcccgtgtaccttgatctggaagaccttcaaaccattcatccaagcgacgaagcgagacagagttgtctttccacttccactcacaccgataagaatgagatgaccttgaggctggcggaagactcgatcgatgcgtagcgcgtgctcaaggacatcgttgaacaacacaagcggaacatccacctcttcttcgcagaaggttcttagacgtgccttcacgaattcacgcagactctcctgttcgacaggcacgtagttcttggacagccagttggagaacaggataggacccttcaatgcttcttgttcatcgattgaagggaaatgttccaaggcaatgcggcgaacagcatctgccgtccaagctctctcatcttcatccacgagtctgtcctggaatagacgcagggcttcgtgcgcccaaatgcggaccaggccttcaacagaaagggtttccaatggcttgatggcctcatacagaccccgaacccatctagtgagctcacgaggcgagtaaacgtagtggggctggatttggggcgtgaagcgggtttgggattcgaggtagaactgaaccatggccctggtgagggcctcggagtatccacgcagcaacggaaggatcttaagcacagcagagttgaacgtgccatagatttggttgagagagatctcgccggggtagtcgaccatgatcaggggagcatgacgcaggaatctctcagccatcggtgtacgaccagcatccgtaggaggattacaggcaccaacaaattgaatgcgatccagggtgacccaggtcttgtcggtggttcgccagaagccattctgctccacaagttggcgcaggaatgagatggcacgctgagtgccgtagcgatcaggggccggaagattgatctcgtcgcagaaaatgacaagccagcggccgatctggttcggagacatcaccacaccattaagagtcttcttgtactcacagtactgctcaaaggtcttgatcaggaggtcaggtgtggtggcactcgagaagttgagaccaacgacctccatgttcgggagctttcggagcgcggcgaacaatgtcatggtcttaccggatccaggaggaccgcagagcaacaaaggcttatgctcagcaagccacgagtacaacacatcttcatgacggatagtatcgaccgtggggataatgacatcggtttgagtgacggaatgtgtgttgatatcaatcgtgggcacctgtgaatgccaactagtccagtcagacttgggaagaagaacgtcatagtcaatcaaagatgaatcgccgtccggtggaagatcgatagtagacattccagtgatgtattttccgaactccttgcgatcacttagtggacaatcaccggtaagagaccagaccagcgtcagaagaagcttcttggacatgtaggactcaatctgttcagagtccagagggaagtctggatgctggacattgtattcgaggacgtttcggcaggccttgttcaacaagctgaagagagtgttgagggcgcggatatccgtgaactccatgatatggttgtatttctttgcttccaccaaagctctgagaaccaggtcatcaacctccaagaactgtttgaggattgttgcaactgtgtcctgggcatcctgtgtccggattactgctgtccctgcgggagcactgtcttcatccaggtcctcgaatgtctttgtcctgaggctttcgacgtagttggaaatcatcatggttggagtaacagtgtcggcattgaaccacaccataccgcaacgactgactgtggcaagcgtggcatacttcaagctttcaacttcaaacatgatgcgaacatttgaaggtaggttgagacgctctccattgggaagggtgaggagtttgttgtcatctagaacactgttcaggttctcaacccattcagggtcaacatctccgtcgaaaacaatccaatggcgtttgctatcctcgcctcggaggttgtctacgatctttctcagaattccagtgaagagaccgtctgtccattcacgggtagtgctgtcaaggttaccatagagagattccttagacatgaccttagagtcgatgatgtgagagacgccctcaacgccctcaatgcgctgcatcgcttgcagtaaaatcttccaggcagttgatttaccggctcctgacttaccaaccatcataacaccatggtggatgcattgaatttgatagagttgcagtgccttggtgatccacatctcactgtcgacgagatgttgctctttggtagcaatatcacggatcgcttgggtgagtttctcgaagttggcaggcacataatccacgccagcgaagtcttccacctggatttccagcatgatttccacatcttctcgaataagcttaggagcaattgtctcccggagactttgaacaatgatttgaggttcaatgacatcctcggggcctagatctccctcggtactggccagacgcgcgcgcttgagaccgcctgagctaacaagaacactcttcaatgcacggagaccgaagtcgtaatgagcctgcttggaaagtcgggaagcacagtggtcgaagaaggggactgtctgcttggagagagacttggcctgcttgaaaccttgcgagaaaagcatcacttcagcaatcagttccttatccggtttggacatggcaacactgcggaacagcttcttcaagttgtctggcaaattggaacgaccagcgtagccagggttcatggtaatgaaaattccggtgttggagttcacagcgagtcgtcttcctacgagttcaatttgggccttgtcgccatctccgccagttttcagaccaatctggatgttctggatctgctgagagacggccgacaaaatacgttcttccagacggttgaactcgtcaaagcaaccccacgctccaacctgacagataccgaggaaaattcgacccattgcttggaaatcgaatgtgtcgtcacaacagaagacgagggtgaaacgaccgagttgcaggcccaatgccttgactgactcggttttaccggtaccagcagggccatatggcgaaccacccagtctctggcaaagagcctgagtaagggtgaggaaacaacgatctgtgagaggcgtgcggacaagacgctcaggcacacctaaatactcgaatccataggcgagcttcgcgttggccatgtggacatataggcgctccaagaaatcgcccgaatcgtggaagacataacgcatctggagaagccaatggtagtgagttggcgttgtggcattgagacttatgagcttggagatgcagtcgcgctggtgaacgaattccgtgatcatatgctcacacttcttgcgagtgatcggatcgagttcaccaagcaccgtcgcagccagcaactcgagaatccgaacttcggaaccgtgcaacgcagggagggttgcacctccttcctccaaggaatgttgcactgcgttggtccaagtgacctgactggcgaggaccacaatctgagcagggtagttagacaagaagtcattgaaagccgttcggtccacatcgctgctatggtaaagaactccaaattgttcaacggcctcgccgagaagttctgctagagtcaacttcatgctgttctctagcgcggagagccaatcattaatacgaggagtcttgaggaggttaacctctttcttcaaacggacttcttcgccctccttggaggtaaatgcaacaatattgttatcgtcatccatgacaaggcctgacatcccagcgaacatcttcttgaaatgcttggcgacacggaagatatcattgctgttaccaatgatctccaacaagtcctcatctccaacaaagtaaaagcgaggaaatgagacacgttcacgctccaaatattcaccgagtgccttttggattttgttcagcaaatcagccagtctctccaaggacttttgaacatctacaattgcgagaatatccaaaacgaacggagatttgtacaccttcttcatgacagtaaagaattccgagttgatattctggaaacggcccgactccaaaggaagaagatgcttgatgtctgcgttgccggtaaagacgccttccaggtagacccattgtcgctggacgtcgatccatacgtcgaaaaggacatggactcggttcagtttatcttcccatgatgtagcttcttcttcaaattctttgtagtacggagaatgtctcatggcctggagggagttcagattttcgctgcacttggcgaacaggtcgtcaaagccttttatcagacggcatttgttctggtagtgtactaggtccagagaatagttctgccatgtctcccgaacagacttcaggaattcctccaatgccatctcaccctgtgcctgtgcaatgatagcacgaatgatggaatcgcttgatgcgagttgtaaatcccagacatcaccaagggtcaaagagacaagagagaaacgcttgtcgggtttaagactcttgtatattttgtgccaatgtctttccttgacggcttcggatttcatgtctgacaaaagtgagttgactttcagcagctgccgaagaacattctgaatgtgttcaaaggcagcatactgtctcatgcgactgggcatctccttggtcattttgatcaagttgtcaagagactgtcggagcttcctaggttgcacgctggtccacagcccatcgcgaaggtcattaagactgttccagattgttgctagagcagcccagacagacatgaagtcttggacctcctcgaggatggggggaagtgatgactcggaacttgggggaagatcgagagcttccttggcctttgagaccatctcaaactcagactggagagcctcgaggcgagactggaaagagctcagggtgcgagatgcttcctcgggtggaatagtgccagagaccggcttctcatcattccatttaccgataacttcggcaatcttgccggcaatgacgtggtcttcagcgctaatctttgcacgcaaggcttcggtttgctcgttgacaattttgctcttgcggctaagcagctcgttaagggctgcccattcaccatcaacattctcaacgtgaagccagtcatacgggaactggtaacgttggcgggcgagtgtggtttggccttgacggaagaggtcaacctcgggctcccagactcgagtcttccgcttgcactgctgaacaatggtaatgaaagacacggcatgcgccgttgaagaggcctctagggtttggccttccaagtcccttcgggcagcagcaatctcggaatgaacctctctcatgcggccgccaagcttagaaccaaacttcacgaggatctcatgctgccactggtcgtatttggcattcaccttggtttggacttgctcgtaatcaatcctgatatttccgaagccgcggctgacttcagaagtatcgaatgtagcccgactctttctaatttcctgaagaagctgaagccattgagacagatcatctcccaggatttcgtaaacctgctcagaccgaagatcccaaagtgattggaactgcagccacttatcgacatactcagaaacatccttcagtctggactcgacaacattgtagacttcattgagctgatcggtgcaattttgcgggaggtcggagaagcagacttcggacaggcgaacattttgcacgacaatggagatctgataacgcgagggcttgatcttttccagattgcaaatcacaccgagccatgcatcaaagtgggagaaccagcttgcgcgtgcaaattgtaacggcgggtccagatggaggacttggtttctcatcagaatctcgtggaagagttccgggaactggatcttgtaattcaaagcatccgcttcggccgtcgcaagttgatgatgagaagtcgagttttcgttgttgataccttggaaggtcataatccactcgcgcacagcgcgaataagtcggtcgcgcagaattgcctcgatgcttccattaagctcagcaacccagtatccaaggttcacgtaattttcgaggttaagcttatcaacagcaacttggatgctgtccaagcgttgcttgaaagctgatgagtcgtatgggcatgtcttgagttcatggatcgatttctgaatgttctcattgatggcgtcaagaacgctagttttcgtctgaagtgtcgatgctgaaacggcaaactcacggacaaattgaacatgcttgctttcagaccgaccaggcaacgatgcctccatgccatttgccaatgctgactgcttgacgtgtagctcgtaagaatggacgaaggattcccaccggagagggatacccttggcaaccataatctgtgcatcgttcatgtagccgttgagcagcatattgacatcggtcatcgacgcgattgctcgattggtctgcaacagggtgcgaacactctccatcaggctaatggcgtaggggtaaacacgcttagcctccttcgagatattgctgacagcatgaggaacttggaagttgagccagataagattgcggacctccttgaagagggcaattatctgagcatcgaagttgactgccagctcccaaacgtttcctgcagatcggttgcgcacaacattaaacaaccgtccagcaattgtaaaatgacgccgttgaacatcccacagccatgactcgaaaacaggccgggtatcgagcttcttacggaacaggttaccctcattctgtaatttctggccctctgcgtgtaggtgccagttctcaccgagaacattctcgacctttcgcatgtagccatcaagctgatgctcgatctggcgagtccaaataatggcgcccgacacggggggcaggtcccgcagttgggccatagcatgagcttccgaattaccgtactgttgtttgaagcgctcatgcaaagcactgatgtctcgcttgacattgtcaataagttgcgtttgatattcgccaattgcaccacgaatcttaggacgaacgagaagggcgttgaacttcgagaacacacggaacatctcattggcattcctggcggtcgccagacggtcacgaaggcgagcaatgatagagttctcaacacgggaagtacgctcactgtaggcaatttcagcctgttcccaggtgagagatccctccggtgagacatccaaaacgtccacgttcttgagagcagcgtaggcgtgcgcaacttcctctacggcatcaacatcaccaatctcctcgactatcacagcgccgtcagcatcaactccagctccattctcggcagatgaagagctgttgggacctagaacgttgataatggttttctggagctgttcatggttgatcctgaatgtgtcgacgtacttcagccgctcgcgggttttgtcgtgtctcgcattgatcttaataggaataaatttttcgttacgacgccgtgttgattcgcgagcaacgtttgtgaattccttcaagttctcatcccaagtgcgccaaatcgcttgtgtggtcttcatcaaagaccggaactcgcgatagtccagatgcaagatcgtacgtccattgatcagctcatggatcttcttatcaagatcgcccgagattgcttcaacgagcgaaagtgcccgcttaatggggtaggggcaaatctttagctttttattcaggtgagtgaaaatcaagtttagtgattcctggaccttctgcaaagaggtcgcagacaggagttcatcgagaggaaagtctcgcatcagctggttgtacttctggaccaattcagtggcctctttcagcccagtgtctgccacgaaactgagggttggttggtatcgtttcgcatggcgaagaatgtccatagtcaaccgaacaccatcgctttggagctgagcttcgattccctccaaggcagcctctaaggacagccagaagttgacctcaggagaagcagattcgctgtcgggatcacgggacatcttagtgattgtctgaatggatctaatccaaccgttcacgacattctgaatgctgtttgtgaaagcgctgctctctaataccgccgatggaatcaactcgaccgatggtttgataccacgtgtttccgcttccttaagagcagcctgcaccatttcatgaagaggcaggttcagagctggaatttctacattctgctggaggtgcatcaaccctagctccaaatctgcgaatctcttctttgttcctgggataccagtcttcgcttccgtatccgttttcgatttcgtgccgatagctgtctcctggctgcgagtgtaggattcgaagtaaggactcagaccatggtgtatcatcaaatgtaggatttggtagggtgacatggaattcccctgctgggcggtggtattgctgagagtagcggggccggggagattcatgacttggacttgcgacgctatcggaagactcatgtcgattggaacaggccgttttatgatcgccacggaggatacggttgtaggagcggacgagatatcggaggagagattgtaggcatatttcaccgctgtatcttcgcggcataattagcagcatatttttgaatgcctatgcacttgggtttgacataccttggtcctccgtttcactgtcggtttcctccactgtcacaatgtccttttgcacatagagtgcaacttgcgattctgaggcaaatcgtgtacaccgttgtagtgtttcattgtactttgattccgaaagcaagctcccagcgctttccagctcgaacctttgggctcccagtgtcacctgaagcacttcggtcaagtactgaatgaccgcgccggaatcaaccagagctgcggtctctggtgctgaggcgccatttggcacacctgatgaggcgacctccatgatgccgagattattatgacaaattcaaagtgttcatcggtggtaaggaataataggagcgcggatcgggtgggtgtttgggatgttgagatcgcgtcaagcgggttgggccgaaaaacacagagcaaaaggataatgacaaaggctggaaagaaagctaaaatctaatcgattaaaaatggttgcaaagataaattccaggcctatgccgtcctgggtcttatgtctgttgcagatcaaaaagatacgcggcgtgtttgctttacttcaggggatgaacactattccccattaggttaagcgtgacacgacccccatgtgacaccgcacatccatggctctcgtccctatcccgttcctttcgaagtataagattcaccttaatattgacgggtacattatcgggttactaggtaatggaatttgaatctcataatttgcaaatggtactaaaatgaaacaaagaacaaatttcgcccaatctgtctgtcctccacaacttctctccttttcaaattgccgttccgatacttgcgcggtccacggtggcttgtccaccttgacaagcacagtgatatttctctcggaactcggaaagagacattccatcaataacagccaatgcccgggtactagccctcactttagcataccgactagaagatgcgactgcgctggcaatggattggccgtgcaccataaccgcagcaaagaccctgggggtctccccttccacggcagggacctctgcagatttcagacagtaatcggtgcattggtagctgtgagtcatttggctatgaaggaatgtctatgacctattagcataaagcatataatctcaggggcaggagatggtcttaccgttggatgtctgtttgcaaatgtgtcgtaaatagacatgtcgtggaaaaatggtaggatatgcatgttgaagaaggcttcaataactgtgaagtcgaagccagaatcaacaaatatagcacccagataagcctcaagcatgtcgggaagacactgtaattcgtgagcatgtggattgtgtccatgtcaaataaggaacttacctttggggaatctgacgtcgaaagccagtagtcgacctctccgttgccttcgctctctgcaagctggatttcctctgcgtatttgttgttttggatcatgagaggattgctgaaatgctgaagatgaacatgaagccccagttttacagccaaagcaccaagaaatttgttggataccatagccatctattcatgttagtcggcacttgcttgtggcttgacattgtgaaaaaaaaaatttacggaccttgtgttcagtcaaccactgcggatctcggttggggaaccgatgaaacaagtgctccacgcacaccatatccaggagtgcatcacccaagaactcgagcctctgataacaaggcaccttagcccatgccaatggataagatggatgcgtgaaagccgaccgcaggagacgagggtacttgaactcgtagcctactttctcgaagatttgctgggccaggttcttttcaaatccatccgctgccctgttctgatacaaaggcatggaatatgctgagaggtagtcttcccatgaggttgccgtgtggttattactgttgacgaagacggtgacagctttgatagccatatcataccgattgtcatcaccccccgagagcaacgatgctcctatcaatgcctcgcagacatctgctatagtcttctcagccaaggagtgcttaccttcactggcaaaaaacttggcgtggtcccgaccatactcgagcgaaagacctggggggtaccacatatgtctgtgattaagtgtcagtaaaacacacaattgttgggacaaaatgtaaagaacataccgagagaacccacggctacgtatgtactcatagagtttcagttcaattgcgtttctgaacaggttcttgttgcagatgagacacattctgttaacgtggtagtcgtattcatcatcctccggattttgaataaagagcgaaatggatgttgccatcttgagcacagagtcccctagtagttcaaggcgctcgtaatttttccccattcctcgttgaacgtgaatctgtaagctccgatgctcttcggtgttgtccgaatccttggtgaaggcctccagggcatactcgagcttaatgccaccaagacctagcatattgcatccctcctgggcgatcaggtaggattccattcgcgtgataattgctggaaagacaaaacacgtcgcggccacagacgtggaaatctgagttacatgttagcatattggataaactgaaacgtatactggtgaagaactaaccgccgatatagccaagggctgagggcaaatgacacatctcgagttggatgctttctcttcctcggccgctttatcaaggaagttccgccgaaggcagatcaactccgcctggaagaccggttgggtccagatacatcggttgaagaatttgggacgtgaatttttgctcaaactcaaggaccaattcatgatattgtctgaccattttcgagatggtgcgtaggatgggggtgggtctgaaggacgtagattggggtctatagcaagcgggaagtatcgatactttccattccaatcgtcgtagatgaatcgagtcagcaacgattctggctccatgtcagaagaccacataagcttggggttatctcggacatattgtaaagccgcccagtcaattatgtcaaagatacttgttgaggttccaatgtcgacatcttctcgagcaggcgcaagccagtatggaaactgttccgagacgtgcttataggtcttgtgaaacacgtcgtgaaagacagcaagtgtaaatgcagtcagatattcgagatctttggaagcaacctcgaggccgtcgtcaatacacaaagactgaattgtagtctcgatgtccttatccaagaagaccgggaaagtcggaattgtagtgattcgctctcgtgtaagcaatacaatacttccatgagctcgagccagaggctttgatggaatgagacgaataactatcgcgtagaggcgtgtgggaacggttccctgcagcctagcccagattgagggcttagtacgcattcggtactgatcagtcctctttgaagtaatagccagtttggcattgcgcattgctggcaagcgcttgtggtagatagagttgaagtgctcatccaacagattcttttggcgaagcagcatacacgcatcaaaagcagcggactgcttggcgagtgatttcttcgattcggaacgtccaatcactcttcgcacaggcgacttctccggcataattatctcacagctgaatgattcgttctctgacatcacaatgtatgtgaccgatgctgatatctcattttcgtattgctagaatttggtcagcgttagctttgatgaaagccatcagaggcaaactgattcttaccaatgagctggcaaatcgtgccaatacaccaatcgcatggcgacaggttaacatggcacctgtgttcgggatggtgtatgttctcttcctgtcttcctcgtgaataagccctttcgtatcgtgatcggctccgtacaattttcgatcctccggcagcagattgcagaaattcttcatgaggtgctgtttatgtcagttagttcagtgctctattacctgcgaagcacccttacctctgctcttcgaacttcctgtagtctcatgctgtggttgtgattgccactttcgaccatagttgcgtactgcagagtagtgagtaaatcagttgcgtctcataaaggggaaggaaatctaaccactgaatcagcgcttctggcacggcctcggctttggacatattgaattaccgtgtcaaacagatcgaatctttgctagtcagtaaaagtaacagttgtgattagaatggtgaatgacataccttaccaccagattacaatctgggatgtcaaggccttcctctgcgaccgatgttgcaaactggaaatgattagactttctctataagttgttttttcgggtcgtgtaaaagctcaccaagcagttgacttcactttttcggaacttgaccaagacaagaaactgccgacgaaacgtggaattcattcctagagcatctcctttgcgaacaccaaccaaagcatcgggacggaggtttgggatttgcagcttttcgcacagctgtaacattattttagctgtattgcgccgttgtgtgaacacaatgcatttggtatctggcgacttcgcaaactgttcttgcaactttctcattaaaagctctactttggagctgagatcagtcggcgtaaatgcctggttttcaatgtattccttgacgagctggttggcttcttggatccgcttaatgtcctctgaggccttttcagaatcctggggatcagaatcggtgactttgccgatactaccctccagcttgggcagcacttcgtcagccagggccaaggcccatacctggtctgcgcaccaagcccctaattccgagcttgcaaccgatgcaaatcgaaatgcgccctctagtattggcatatcaccatacttgactttcaaagtaccatgtagattggtctcaaacggcggaggaagcttgtcgtagacccattcctcttccattggcttgttcacgaaattccgcaggagggtaagatctgaggttgttgcaatgcgactatctaaaagagtctcaagttggctatatacagtcagcaaaagcttccaatttcggttagttagggtgctcacattgctgcttccgctatgtcacacttagcatcaaccggggaagcggtcatcccgaagatccttgggcgcttttcaggatccgctttcagatagctgtctcggatgatactaataaatgtcagctcttgtcatcatgttacaattgaaaaatgggctgcataccgagcatacggatgctccttcttggcatggtgagcttcgtcgaagatcagaagattgatctggtcaattcttatatggccattcagtagagattggtttagaatctccgccgtgcatacaatcaccatgtacttttcaagatgcttgttccacgtctgttggtcccaaagatcgggtcccagattgccataaaaatgagcgactctttgatcgagattgtttctcaataccgcagactgttgaaaaaccaaagtcacactgtcgaccaggaaaaaggcaacgcgaggacttgcgccatttgcacgtttgttgagttcgatttggagaatatgcttgagcaaaagcacggccactaaagtcttcccagaccctgtgtcgagaaccgcgatcgtgttgctagcccgtgctctttcaaagagctcgatttggtattcgcgaggatctagaactccacctccgggctctgtattcgcgagcaaacgagcagttgaaagttccgcatcagatagttcgatatgtgatgcattgggaccgtctttaggcccgttgacgacatggtcttcaagccttccgaactgtcagcattggtcttcaagctaagatatatcaagaacttacagcgcattaaacatagcattttgagttctgtgtcggtgcgacaccttcaattgtggggtcgcagcttcgtcgccagatagatctgagctagtatcttcagcctccatcttagctgtcttaccctgtgctagactatgttgaagaagaaatgctgaagaagaggaagaggaagaataaataaagctacggaagtgactcaaacctgggcaagagaggaaaccgtattttacttagcaagcgccgacgacataatacgtttttgtaccccgtcctacttagacatgaatttctcataagtgaagtgagaatgatagatcgcaatgtttgtaggtgcattgagaaggctttcaagaatggctccatgtgcttaacaaaagtccatcaatgactgccttaagtcttttttttgatattccaatgatattgcatttttcttatcattagaaaattgacggcatttacacttatacaataaattacatgttcctatgctctgtcgtcctatatatatccattcatgcatccaggcatgacatccgatgagaatataaactaggactgaaggtgcctgtgcacatgctaaaatgagtataataagagaattgagccatcaatgattgaaaagtaacgactatctatagagagactaaaatgaaggagagccctagaggagaataagagtggaatgaacacatatcaacacaaacccgccactcagtatacagaaaaaacatacatcgactcatataagagtagaagcctttggactaagcgtatagtcttgataccaaccttggaacaagtatagaactcaaaaaattgaggatcgaagtatgagcttctttatcaaacgcttatcggataaaagcttggccttatcgccttatcgtatttccaaaactcagatcgagatcgcgggggacatgtgagcccctactaagcacctctcataacctatctccgacctaatataagcccgcaaggccaatatctgaaccaatggaagaaccgcagagtcttcgctctctatttgcatcagcaaaggagcaaaaagatgcattgggatcgcggggtgacaccaacgctgagacctaccgagacgaggtgaatgcgacgatagccaaattccaagaatgccagcgtcaagtgagcatgctgtccttgtttagttctaatgagttgttggaagatatttcgaccggtgatctccagtacgccaccttgattccggcattgcgttgcccattcggctgatttgttgtccaggtacatgacactggaatttcatctagccgagctcttgcagcgagtttctgactcagatcgtgaagccgtcctcaagcgtgcgctcgaagaatatgagaaatacctgatgcgtttggatgagtacctgctactctctggcggggataagaagctctttgagcaatacatggccaatccgacctcttttaccctggcgccagctaacgacgctgccgccagacgggaaattaaagtgacacggtttcgggaagaaaaagaactaaagcagaaactggaggtatgcgggatcctttgctggatattgtttggcgttcttgcttaccccatctaaagtatttcggacgcaacgaagctcgactgcaaagcgacgacgatgacacccgatccctctatctagcggagcttcagctttacacccaccagaccttccaggcattagatctcctgatccaagaattgtcgatactttcaggtatgcgcaatgcgccgcctcgccctccaccgacggacgatcccagacagcgaagcaatattggaggtttgaattactcagagaagctagatccttcagtgtcacagctcttgaagggaggcagaggcggtcctatcctgaacagcaaaggaaagccaatgcagccgttcacgttgttgggtcggcgctcagaaatgcaacaaggagtctttcgttcgggccataaccttcctaccatgacaattgatgaatatctcgaggaagaacacagacgaggaaatgtcatcgaaggaggaggcgagaagtctggcatcaaaccgcaagttgacgaggatgatcacaacattgccgaccaggaaacgatgaaggcacgaaattgggacgagtacacggaagctaatccgaagggtgctggaaacacactgaaccggggataatgtaaaataaccgtcatgaacagagctgctttactatgtccaaacagccacgatagacagggttcttggtgaatatccttgatatattgagcgagtacgggtatactagacaagaaaactcgttcacttcattttcaacagggtatatctgcctagttacagtaaaagttgacctgaacattcagactgcagtggaaacagtctccttggccttgttctgttggatagcctcgagaatgtctccagcgccgtcggcgaccagggccttggctacggtgacgccgaaggcctcagcactttcagcagaggtgacgtcggcttccaattctacctgagcacattctttgccatcgacactgacgaccacagaccgcattcgcaactgcttggcaccctgcgcattttggacccattcggtttcaacgcctagcggggcactgcagcctccctcaagagtccgcaaaagactgcgctcagccaagaccgagaatgtggtatcttgatcaccaatcgtgtccaacatattctgcaaaacagcgtcttccttgcgaatttcgatgccaagggcaccctgtccgacagcatagagcatgccgctgttcttggagtccaaatattgggtgatacgatccgtcaaatcaagacgcagcagaccagcagcggcaagaatgacacatgtgtacgggctatcttcagcatctagctttgataggcgagtgccgatgttaccacggacatcctggactttcaggtgggggtatttctgggccaactgtgctgtgcggcggatggacgaggttccaactacggacccggcggggatctcggaaagacttttgtatggcaacccttgtttcaccacaagtacatccctgctatcttcgcggggcatagtcgggcctagcttgcaggaagaggggagagtagtggggacatctgataagattgcataagtcgtcgtcagctcttttttagggtagaaacagctactctgtgtgagattgggatattatcagacctttcagcgagtggacgataagatcgacctgtccgttgatcatcaattcctccaattcctccgtccacaggttcttggtggtgaaatcccgtagtgcgatagtggtgttcaggtcaccggttgtctccttggagaataccttatattcatattgcgggaatgctttcttcaatgcctcgaggactaaatctgtctggagcagagccagtttagatttgcgggtgccgatggtaaaggtctttttggtgggggcgggggtagtcattttgaggcggaaagaaagcgtatgcagagaatgggcttagagagtatgcgagtagatgtacggggttgtatgagctatgcccgcaagataccagatcgccgaggaaagtcaggcgaagaggcgaagtgggtttggagaactccgatcacgggacacatgcagatcacctgaacagagattacgacgttgggcacatacaataatctgggaaataggaataaatatataagaatagtagactcatagttattacaatgcatgtagatctatcagattagatataaaccgtcaacggcaaatcccttaattcttccccggttgatcatcaacctcggctacagggcgtggagattgcgaggcatgcgacttatctcccccggacttcccatctcatctacgtgcttctggaacctccccggccatctctcctctacatataattcattcacatccccttcatcccttgtcccatcactgattcctcattctccatacaatttacacttacaccttcatacttcatattcccggattcctatctttgccaccctattccatcatcactagggcccgcacaagatgggatccaacggtagaactactaagattccccttgtacctcttcccaagggctcggtcctgctcccgggcgtgactctacgcattccagtctccaaccgtcccgatctcgccaatcttctgtcgtcactagtggacaagccttcgaagcgagatgcgaatactatcaccttcggatgtgttccactcaactcaccttttttgagccgggatggacagcagctcctcgaaggcgacgactcggattcagagcgaaaggagcaatatgactcaattgacgccggtcaggcacggaaagaggacttgttccgatgcggaactgttggcaaagtcatcggagttcagcgccgggcctactcggagccatttttacttgtccaaggttggcaaagattctctattaagaaggtcctacgagaccgcccatactttgaggctgaggtcttcattcatgacgaatcaagttagtttccacagacacaaaggacaaagaccacatggctaatcatacttcctatacttctagactctggccaaggcgatgcggaagtcgctgtgctattccaacaattgagacagctctctcgagagcttcttactctcttacgtctctcctcattgctgtcggcagcctcctctcgtctctcgccactcgttgcccgaaaattcgagctctatatatcaaagacagaattgacacaagcggggaagctggcggatttcatggcggatgtatctgacgcaagctttgaggaaaagctacgtatcctcggctcgctgaatgtcaaggaacgcttggagagggttgttgagatcctcaccagacaggcacagcatattaagagtagtgtcagggtcacctcgattggctcgacctcgttcccctcctccgccatggatatcagtcatattgacccccgtgatcgcgagttgctcgctaagcgtgcaatttcgggcctctcaggcatgacacctcctggtgggcggggcaacgacgaagagaaggaacccaatgaagtagatgagctacagcagaagctgaatgatgcgcagcttagtcccgaagctcagaaagttgcggacaaggaattgaaacgcctgcgaaagatgaaccctgccaatgccgagtacggtgtttgccggacttatctggaaaacttgtcagaaatcccatggaccaaagcgacagaggaccaacttggaccggacacattgaagaacgccaggaagcagctggatgaggaccactacggcctggagcgaatcaagaagcgactgctggagtatttggccgtgttgcgcctgaagcagtccaccaactcggatgttgaacgccagatctcaggactttccagggacttggacgcctcggcagctggagatgtcgatcatgatgtccccctgctgtcagagtctgaccggattgcattggagacccgccttgagatcctcaagtccaagcgtatgaccgacaagtcccctatcttgcttctggtcggaccccctggaactggaaagacaagtttagccaagtctgttgctgcttcgcttggccggaaattccaccggatctcccttggtggtgtcagagacgaggcggaaatccggggccatcggcgcacatatgttgcagctatgcctggtttgattgtgaatgggttgaagaaggtcggtgtttcaaacccggtcattctactggatgagattgacaaggtcggcggcgccaacttccaaggagacccggccgctgccatgctggaggttcttgatcctgaacagaatcataccttcaccgatcactatatcaatatccctatcgacctgagcaaggttcttttccttgctactgccaactccctggacacgatcccggcacctctgcttgaccgcatggagaccatctccctgtcaggatacaccaccgttgagaagcggcacattgccaagcaacacctgattccgaagcagattagatctaatggtctcaacgaggaccaagtaaatctgtcggacgaagtgattgataaaaccatcacctcatatacccgtgagtcaggtgttcgcaacctagagcgggaacttggctctatatgtcgccataaggccgtccaatttgccgacgccggggatgccgatcgcctagccgattataaccctgttgtatctgtcgacgatctggaggatatcctcgggatcgagagatttgaggaggagatcaccgagaagcacggtcgtcccggtgttgtcacaggccttgtcgcctactctactggtggccagggtagcatcctgttcatcgaggtggcagatatgcccggcaacggacgcgtccagctgaccggtaagctgggcgacgtgctcaaggaatctgtcgaagtagccctgacgtgggtgaaggcacactccttcgagctcggtctgactcacgaccccagtgaagatataatgaagagccgtagcctgcacgtccactgcccctccggcgctatccccaaggatggaccttcggctggtcttgcccacactgttgccttggtttccttgtttagcaacaaacctgtcccaccgcagatcgccatgaccggcgaggtttctctccgcggccgggttatgcccgtcggcggtatcaaagagaagctgattggtgctctgcgtgcgggcgtcaagaccgtgctgctgccggaccacaatcggaaagacgtcaaagatgtcccacaggaagtcaaggatggtctggaaatcatctatgtcaagtatgtcatcccttcctaaccttggtttaataactgctaacaattgtttcacagacacatctgggaaggattgcgccatgtctggcccgatgcgcagtggccgggccagcaccagatgaactttgttgagagccgactgtaaaccgttctcaacactataagttcaaggggctttgcctctcgcggtccccccacctaccctcatttttgcatagcgtataatagccagaggcaccattgacttgtatttaatcagattgtcttccgtgatgcgttcatgccagtcaatatttcgtgtctatatcactcaacataccgggttcagttctaacactaacaccacaactcacaattcacgaaatctattctatcataaaattcatgtaaaccttgactagattagatcagaaaagatgatacgccatattcaagatgtatacaatctaccccaagagtataatacacggatccagccaaacatggaccagaagatagagcaagaaacaccaattttccccaatggaggggatggaaaaaagtcatgaagaacaatgcaaggaatctcatcaaaacagaaaccgattaccgcgctccgtgcttccgctgcttagcataccaagccggcaacgtagcagcagggacgaaccctccattcttagccgcctggtgtggctccaagcccagagccttccaggtcggtctccaagtctccttcttctcgagcagcgccttggcctgctccttataggcttggcgcaactcttcatcgggcttttcacccttgttcggcttgggattctccttttcttgtaggtcgatctggaacttctcggcctttctccagccttcattctcccatctattggtggaaattgattagttaaaatgtcccgtctggttggaggtgcatgtgtagtattgggaatgtagagacggaagacaacggaattgaacttgaacaagacgacaacgataagtatgggtggcacatactcagtcagatccttcggctcctgggggtacacgaagggctccttcaattcaacggtcatgcgcttctgtgacttaggtcggcgccacgggccgaagcccttgttgtcacgcgagattcgtgtaattggctgtgcctggacataactgcggatgctgagggttccgactccgtacaagtgccataggtagctgcggagatcgaacttgttgaagttgagggggacgcggaattgagcatatcggggggtgaggttgggggtgcggactaaagcgacgcggaattcaggcctaatgaggcgaagaattagctgtagtgcttttggtgtttatggcaaatatccaattgagccggtcgagtttgttgagatgctgtttgggtcgacccgaattgaggttcttggaaattttgggcaacgtacatatacacgggcttgccgatgacgctgggccatttgttttttggggttggttggaccccagcctggttttgtaggcggcgcagggctttcgcctgaacactgctgagacgcaccatcgtgttgttgagtggaggaatctgggggttggaggtgcttgcggatcgcgaatcaaaactgcgttggccgatatgatcacatgacttccatgtatacgccaatagtgaacgacgcaacactcgttggacattcaagtcaggagtcagaattgattacaatgcatttttggtatagtatgaagtatgttgttaatatttcctttagaaatgaagagtttggttttctgtaagttctcccttgataagaaattttgaaaacctatattacatgctttattcatcgtaaatagtcattaaaaaggcccaggatcttttcttttactgctccgccgaccccgagactcggagttcttcgagtcgcttggtgctgtcatcgatgtcttcggagttcttggtctcgtgggcatcactggcctcttcggcttcagatccagactcttcctcatcatcctcatcctcatcctcatcctcatcctcatcgtcgtcgtcgtcgctaccattagcctccccatctcctttgactcccacctctaccatataagcctcgagctcacgggccatcttgcgtgagaagcccgaggcttcaacttcgacatccagacgcttcccaggatttttgaggagcttctttctagcctcggcgaaagtggggccctttgagtcgctcacgaagtggaacttgcgcttgaagtaccgcttgatacattccacatcacggtcgaaatacatttcagcgttaacgtggtcgacagacaacatctgcgggaaatcaatgagaaccgggaccagccggatatgctcatcttcctcttcctcagtaagttctttccccttcatttcggggtctaactcttccttgataaggatattgaactcattgaaatcaccatggataagaccatatcgggcaagatccaagatgatattcataagttcggagtatagcccagcggggtcagcgacttttgagatttggcgcagagggaaagcatcaattagactcatgacgatggtgtgtcggttctgggcgatggggtcggggacagagaatccgttctcgtgcagagccttcatgaaagcgaactccttcattgctgccaatcgagacatgtacatccatgaggctgagctgcggtgtcgtaggtagtcacggttcgtcttgactgttctgaacgagatacgaccgagacggtggattttcataatacgttgcgctccggtgctttctgccaccacgatgatgtctgattccttccccacgccgatttggttgccgaccgaatagatgaccttcgacttttgatgcgcgtgcagcgcaaggtaatccaatcctccgtatgcgagtcggtagccgtcatctataagcagaatacatatatcagtgataagatcagatgcaaaagtaaagggaatgcatacatttggcattcttgacctttgcaatcagattgattttcgcgaggtttgagattgcacgattgacaccgctgccgccccggaggcccgaaagttgcgcgatcaacggcgttggaacgacctcatgattccggctgccagcttcacactaggaataatttacatgttagctaatgattcgcgacagaatatccccaaaggaagaacatcgcggggtaaacccaaggggaggccgataagtaccgctgctagaactcggaaatcttcggaggtgaggtaacgaatagccttagcgtcgagtttcatgattgtgaggaaatgaaggagcttttcactttcttccgatttccataaattgattcgctggaggccagaacttcaagaccagtcaacgatgcggcggaggaaaaaagttgataagaacctagccctatgccctatttcctatccgggatgagaaccttgatagctctcgcgttcattggagaaaaatatgcgacaattacaaggtcttgactggatatcttcgaatgtagatgaaagtcaaggggctagtcgaaaatacgtagtctactcatagatgcgagcagttgaacatatataaaaaattgtgagataaatccatgctattcttcattcgttctgaatacattagatccaacgataacccgaccactatacgagtcccgctggttgcgagcaatggatgtaaatcggggaatatctagtctagcttgcttattcggggttttcgtagtccgggttctggaagataggttagtactggtatgtctgacttgagataagggcacttactttacgcaagataaccaagccttcgagagtgctgctgagagggatgtactgctcatcctcaagctcagctctctcaccgtgtgccagcaggactggtgtgctctgagtctgccatccagtgatggtctttgggcgacccgcctggccgaccacgtccacagcctgaccgacgcggacattgacggtgagtggctgaaggtcctcatcgagggtaataaggaagcgggggaacatggcggtgatgaggaagtatagcaggtagtgatgttcagcgaggatgaattgcttggcatcgatgagtgatacaagcacagtaagcaagcccgctgctgagacacgggaaaggacctgtcggtcggtgtggaagggattgagcgtcatggtacccttgcccatgtgtagaagaccctgtgcgatgcgaaccatgaatagtgagttctggtcgcggtggtagtagctggccaattgccggagaagctgtgcgatacgggcattgttggtaccagcgccacagagacccatggcgaagatggcattaatggcaacatcgttgtcattgtcgtgactataccgggacagtgtgtcgtaaaccttcatttgtgggttgctggggctgatcaagcccatagccaggggaacagcccggcgaatattgctagatccgtagtgcatgaggtgaccgaattgccggagaatcatatcctgtccgacatcctcacccatcgcaatgagagacaggccgagaacagcatacgactggactagctcatcacccttgttctcctccttttcttcaatgatgtcattgcagatgtggagaagctcttgtagcttgagcaccgttccagtgcctgcccaagcgcatactgaggcaaggactgaagtgggcttagccatggggtgatcaactgccttgagaatgtcaaggatgacatcaacctcctcttgacggccaaagtacagaagtgccagaccaagggccatgaaccttgtccacttgtccttgagctgcttctgacgttcctcatccatcaaagtcgtcgcaattgcctcgctaacctggtggttggatgaaccaacaaagatgagacccagtgaaactgctgccatggcagacagttgcatgtctagtgaggcgtcctccacaatgggaaggaggacctcaagcagttcttccttgttggatccggcatatgctaaaccaagacccatgatggatgcaactctcatcggcacgctcttcgcctcaaggttgtcgggatcactcaagagggcaagggcggggtcggaatcaagtcgaacgccggagttcaggataccaatagcgagcagtgcaccagccttaacctggtcttcttgcgcgtaggtgaacttgtcgatcttatccaacccatcctcgacatcacggtgtagcagcatacccagtgacgcagttgtggaaagcatgccatcatccttggtcttccacacccacgggcccttatcaccctccactagcatcatcttatcattaccaaagccggcgttaacaaacgagttgacaaaggcgctggccaagttgtgtcgtgccgagtcaagattggtgagcccggctccgcgactgctctcaagatgtgtcttgtagatatcctccggcattttggggtccagaatattgagttccttggccagggatttgaagtgcttcggaatagaagtgttattgagacaatcagccaaggcctctccctcctcatcttcggctgggaggtcgagccagatctgctgccgagcgacaaggaatgccatctgtttcttcaacgatttgtcagtcgtggcatggatgtcgctcttgataagatcaatgtcattcaaacggatagcgagcacgattgcttgcgaaagtttgttgtagcggacgtagatcccgtgggcggttcgaaggaattgctgatcttcagggtaagtgagtagattgaccatgctgaccatatacaagcagactcgagcgtatgtgttctcgtcaacgaattgagggatatcttcgatgatttccagttcgctcatgagatcaaccgcatcagcttcagcattatgactcaggaaatagggcaccagcgacaacgcaagatccactagatcctgggtatcctggtctgcgttcaaccggttctgatactcctgtccgagttccagcgcgagatgtcggacatactcgtggccccaggagccaagatcctccgacttggccaacaggcggtatttgatggtatccagcttctcttcgtctccgcaggtcattccaagcaccgacagcatgtcagctagcgagttctagaaaaaaggatactgttagtttgtcacaaagcgatggaagcgctgcagaaccaacctgcacagggccgggggcccatttctcgtagagcgctgtcaggtcatcataatgcggtcggaggaacttgagaggcttaggaacagctgtcatggaggatgtagaagttttgataaagttcttgattgcgtccaaagcaggcccatagagcgaggtatcgggttcctatgagcaaaaaaaatgattaacgtcattgtgctatgcgcacgggacaggatagtaactgtacctttaaccgctcaacgagcatctcaagctcgcttttcaattgttgatcttcttcactgagttcctctgtgtgtagttttcgtcagcatgttgctttgagtgccaccgtggacccttgagagagaccacatgctccgttgcgagaacttggaaatgccttatcgcaacgtaccatctttagatgcctcatctttcttcttttcgtctgctggcttttcgccattttcggtgttcttgccgctcaactcgcgaacatcatcaaccttgcccttgcccttgtcggcggaggttggccgttcgccctcgttggccatttctgatggtagctggggaccaagtcggggggaaactgaaccggcgtgggagaagtaggtatcaagcaggtgagcagaagatggtgttacaaagcagagatagatgaaattctgcaagtaaagagtgatgcaagtggattgtaagctggtgatggagaagcagagctcggtctggtgcagctccgtaattagattacataatgtgccaagccctgcggaaggccctcgtcattgttttggatttacgatggctacgacttcaattctatgactcgaatccttatgactctgatttatgagggagaggatgacttaggggtattttaatatcggcttcaatttttacacccctttgtcgtacatcggaaagtgctatgtgcggtttatgcattttaccatgcttgtacacatctaaaagacatcccagaacacatgtaacgccgctaatatcattttagaccaactagataagattattaaattccacatcctcgaggatataggcctcatgagcggccgactcttcttgttatcctgagtttggtaaacgtgccggtgaaattctgattcagatcctagagatttcgctgggaattcattcttatatgcaaaataataggtctgtcgagacgtcatcaatcttgctatctctggggcatcctccgtaaagagttcggaactgcttggcatattcttccgtctgttcggtgtatgccgcagccgttgagccctctccgttgtatgaaagcagaggcaaagcatcgagatcgggaagacccgaagaaaacaagtcgagaagtggcattatagttgatgcacggttcagtggtttttcaatggagcctaagccggcgagagagccccctgtaagcggctgagcaggatcgtgaatgtcttgagtagcttcttcatccgaggttgcgggactgttgtccgcaaattcttctgggggctgatatagctcgttgtgtactgtagcaatcgaagaagattttattcctgggaatgatggatataacaggtagtatcctttggcgcggatcatctcgagcatgtattccataaaggccggatatttctccgatataatctttggttgggaggccgctgtggattgcggagtcgacaggcggttagccatgaacgaatggaattccgcccatgcatcaccaaaatacaaagctgcattactattgggggcctgccagaggaacgagggaagaaactgttctttgccttcaacggtcatgggtggcggggtgaaagattgactatcgaccatgggtttgaatgatggcagttcaagtgagatgccgatcatattggaaaaaaggcgcttggcgcgagaagactgtttgtaattcagtacagcaaacttcaggtagtggtagaacgatggtgcgagctcggtctgtggagatagcagaagcaaatgtgtcatctcaggatcccggggatagaacgactccacggttcgaagcgatgattcttctgtgtccatgccatggggttgaatgcgccgccgaatagtgattcggccaggaagctgggtcagcccgtccaaatgttggagaaaccgaagcaactgtaaatctacccgctggggtagttctattgtcaagcttggagccgatcctaaatagtcggctgcatccaatgacttaataagcctgatcaaagacccagaagactcggaggctgcatgcaccaccatttcgatttgtatattattccacgctattgcaggtacggtcagcatttccggacatgacataccaaagaggaggaagataacctacatcgaagagcttggctatccagtgaagctatccacataagattccttgaatcagaggaaagagcaacgtgagggacgtcacgttctcgagaaaagacctcaaccccgtcccagaaaaaggaatcctcccagtcccgaccttgtgtaatgatgagctcggggctgatgtaggcttttatgttttgcaacccccctatcacagaccgcttcatacggtcatcggtagatttgggtgcatagtccggccgagcatctgtcagttgtcgccaagtcagcaacacgcgttcgaccatcaggatctgaatatcataccgtgccatgtcatcgggcattcactatctctgattctgttgacttccttgattccgtcaatcgagacttcctccttgcccatcaaggtgaaatgcacatagttcagccgctgactagccatccgacaagctaagggcagaagatctgacacactgcggagacttgaggctgcaaacaaaactgcacggctcgtggttttctgcgaatatttatagcgaggaagagagtgggccaactcatagaatttgatcatcccatcgtaagcttcctcctttcggtccgattccgacaccttgactggcggcaaattgtccagtagtgcattgcctggcttgggaacagcagctggattgcctgagccagcccatctggcaaggctttcttctcgtagcttcgcagccgcagagtcgtaccgatctgtgacaggtcctaggtctgtcggcatgtgcttgaagaactcgtagacgaggataagtgcaatgatagcaaacaatattcggcgaggtcggggcattgctcggtgccgcagaggtaggaagcgtgcttgatcggatggtcgatggtcgtcatctttcttgcccatctcttcatcagcctgaaggggcatctttgcgcggttcatgatttcggcccggaattattaagggaaagctccgtgagctccgtgggtttctttatgacatcgaagcaacggatagatgcagaggacaattgcgaccggagtgttgcatatccattgcgaaaggaagaatgtagcggagcaatggtatccaccagcaatgacgcctgggctctcttatcgccttatcgggtcttcgccttttctccaactacgcgcatttcgcaacctaacccccacagagcaccttcctgatagctggaaatcaggatggaagacgatatgaatattgagcctatcgatcaacgcggcaccaagcgcgccgtagaggaagatgagcctctggaaccccctaaaccaaagaaaatcaaggtacagtaacgcgtgcacatgaaaccaatcatacactatcacataccagaaatactaaattccgtacaggctttggatcccgatgtcgtaaataaaattgctgctggggagattatcgttgctccaatgcacgcactgaaggagctcatcgaaaacgccgtcgatgctggctccacctcgattgaagtcctaattaaggaagggggtctgaaactactccagattactgataatggccatggcattgatgtaagccatttttaagattatagcagccggctctaacattatctagcgagacgatctccctattctctgcgagagattcactacatctaagctcaaagaattcgaagatttgacctccattggaacatacggattccgcggtgaagctctagctagtatcagtcatatcgcacatctgacggttacaacgaagactgctggatccagctgcgcctggcgagcacattacggagatggcaaattgataccggcaaagccaggccagaattccgcacccaaggcaacggctggccgagggggaactcaaattaccgtaagttaaaccgatgaaaatatggcaactttcaagttaacggagcccaaggtcgaggatctcttctataacgttcccactcgacggagagcattccgctcggcaagcgaggaatatgctaaaatccttgatgtcgttggccggtacgcagtgcattgctccggagttgctttctcatgccgcaagcacggagactccggtgtgagcatatcaactccagtcagcgcaaatactgtcgaccggatccgccagatccacggcagtgccgtggcaaacgaacttgttgaattcaaaacagaggataccaagttcggatttcacgcatccggcttcgctaccaacgccaactatcatgtcaagaagacagtaattctgcttttcataaatcaccgcgcagtagagtcaaccgctgttaagcgtgcagttgaacagacttactctgcctttttgcccaaaggcggccatcctttcgtctatcttgatctcgaggtcgagcctagccgcgtcgacgtgaatgtacacccgacaaagcgggaagtaaatttcctgaatgaagacgagatcattgaacttgtttgcgctgaaatccgatccaagctggttgaggtagattcgagtcgcacgttcctgacacaaagtctcctacctggcgtgcagacaatcgagtcactacaacgcgatcgagacgctcaaactcacgagggaacagcagaggcaacaaaagccggagcgacgcccaaaacgcccgcaacggctaagagaccctacgaaaacaacctcataagaacagactcaaaagtccgcaaaatcacggcaatgctaggcccagccgcctcacctcgcgacccatccaacccagacgcacccacagaacccaacgacccaacgacatcaattctagacaacggcctccaatacgaaacaaccgatcgccaacccctaaagatcgccctctcatccgtcaagggtctccgagccgccgtccgctccgagatgcacaacacactaaccgagatgttcgcgtcacacacatacgtcggactagtggacgaacgacgccgactcgcagcaatccaatcaggcgtgaagctatacctaatcgactacggactcgcatgccacgaattcttctaccaagtaggcctaaccgacttcggcaacttcggcgtaatccgcctagacccagcgccgaagttggtagatctactgaaaatcgccgcagaatcagaacgccaagagcacccggacagcagcaaagcggacgaggccgattccatcttcgccaatgcaccggagatgatagcgcgcacgctcatcgaccgtcgcgaaatgctgaacgagtacttctcgctgcagatcagtcccgacggagacttgctttccatcccgctgttgctgaaggggtatctgcctgcgctggcgaaactgcctcgtttcctgctgaggcttgggccgtatgtggactgggacagtgaggagggttgtttccgtacatttttgcgtgagctggctgctttttacacgcctgagcagcttccggttctgtcgcggcctgttgcgcaggacgcgctgggggagtcggttacgcaggggccggtggtagccgatgactctggggtcgaggatgaagatgcttttgttagggcgcgtcgtgcacagatggttcgcatgttggagtatgctattttcccggctctccgtgcgcggctggttgccacgtcacggctgctgcggggtgtggttgaggttgcagatctaaaggggctatatcgggtgtttgagcgctgttgagtaataagaggatgtcgtaatgtcatacagttgtattataccgaattatatttatgaataatgaatgaatatctgtctgcttttcggcgggggatctaaaggcctgcattggtgatcgttcatatacctcatacctattgtgcgttcgacttgatattcccgtaaatcctacaaggtatcttgaaccgaatcgagagatgtgaagcctgaatgagacgaataacattaaaatggtcagcagatacgcctgtgatcaccgaaattgtgaccacaccaaccctaaataacacataacccaaagcccatagaagggaccgagagaggagaaaaaaggcgagacaaaatgataaagacaagacgacgaagagataataattcaaatggatatgaaaatgtaataagtatgttttcgaaagttccagttcaaacgtgcagcgtagcatgaagacgtaacccctagacaaggtgaggtgtatcatgagaaaatgctggtagaatgatatgaaataccagtgcaaaacctggattgctggatgaaacagcaacaaaagaaagaaaaaaagtagaaagtagaaattggaggcagaaagataaaataggccgaaatcaagaggtaaaatcaacaagatgggccggctgagaagaaagaaaatatcgggtcgaacagagacagcagaaagattgcatggatggttgttgcaatatcatgccctaaggtcttcagaacgccgagcgccaaagatcaatcaaaaggtcgtctcatgttcgtagaaatcgtgcagagtcattgtatcgtagtgtgtagtatcccgaataggtgaggtgacaacacgcattaagggagtaggtttagtgtccgggtcatcgtaaagccgagtgttgaccctaagtagtcggtagagaagtcttgtgaaatgtttaagcgttcgcgtttgcagtaggaatggcaatctcgtatccagtatccagtaagccgccctcataatcctgattgtgtagactgggggtgggtcgaggctactcttagtgcctcgaataaggcttgttgagcagagctatctcacgtgcaacaatgtcccattcaagatctcgcttgacgggctggcctcgctttttcatttgatgctcttcccattgaaggagttcataactgcagggaaatgtgagcaatctttccttgttgaatgtgagggtagaaggacagatgcttacacaaagcgaagatgtggctggatgatgacgttgagtcgtcttgcgcggacaaagcagctgttatgaattagtatcggctcggccaaacgacttaattatagattacttactatgcacgggggaaagagagatgtttggacgccatgacttcagcgatgcaaatacttgcagatcgggaaacaccgacccgacaatgaaccaatgtggccgtgccgtggcgttttcctttttctgtacacagattagcaggttgaaacagaaacggaggagtcacaaattcggaggacttacctatgaagtccaaacaacgatcgtactcctgacagagaggatcaatgccattatcttggacattgtcaatgtacatcagattgtcagctccccatttggcgcggtccgaatctgtccagttgacagcctcgccaatactaagcacacgcttgattccaagctgccacagaagctccgggttgtttgcgtgattcagattgcccagatacagatacggtaggacacggctggggaaggagccgtcgatgctgtgaaaccaatgcggatccccgatttccgagagatctgtcgactgagtcgcagggctttcctgcaagagacgttcttgaatgtggcgtaggaaagcaacgtctgtcggataggcaaagaaattgcgttgcctatcgcaatgcagtcgaagccaggcttcatgggcaggcaccccttctgcaaacataaagtacgccactgccaacagcgagctttcggtataaccgtccgcacagtggatgagaatcttgcggggtttcccgctcgatttgatcataacgacgtctccgtccggttcgaggtcttccgatgatgtttctgggtgcgcgagataatagatccatctgattgtgttgacaatgtcctcaacctctcgggtgtttcccgatgggagcacaagagatcctgatgaagggaactccaagcgctgtgaaccactctctatctgtttatcgagcatagcgaggaagcgcggaccagggatgttggccatgtcgcatgtttcgatcaataggtcgtagccctcctcctttgatgactcgagagctccagtatggaagtagtccggggtagaccctagccaaacattggacgaaatctcggaagcccgggacattgtagacatttccagtcgctcccattgggctaccaatttgttcaggttaactctgggcgtgccaaggttcgttcaaacttaccgaaatccatagtttgacctgtcggttgacctttcgcatcgatggaaatgatctctggatgttggtcggcaacgttggagaatttgtctaggagggtatatcaattgatggttcatgaatgcgggagataaggcaaagcaacgaaccggccagaatgaaggtgttgtacgtcggccgttcctctaggggatccattttcgttcgccataaccgctgcgccttggcaaactggtttgctagttcaacaagtccgctatggctatcatcatcttcagcataaataatgatatccgacatcgcagccagcttggcagtttgtatttggaaattgcggacggagaatccctcgggaggatcagccatcaagaaatgggatgaaggtgccagcacctcatgggcgcttattgcgcccctgatgcgtgctttgctcaggtcacctccaagcttcacgatggtaaggcctcgccagcatttcggagtgtgacgagcatgtcgcttgcgacttgaaaagaatcccagctgcagatggttgtctcggtgcagtccatggagccaaggaaacatcagagaggcgtcgggtaaaggttgtgatgcttgatgagcgatcgcggctgctaatttggctccgtcgatggcatacacagcgggggatgacggtcgtccaatgcgcattctttcatctggaggagacaacagcgaggaaggctgaccgctgggccgggacacggagacaggctgaggctgagatgttggaatcgggcctgtagggcatactggaatatgtctgttcgggatagggcttgatcgtcggtttatcaaggctgaggggattggagagggagggggggtcgagtggtgcagcgcctgctgctggactagcactgtggccatgacgactgactagaacgcgtggttgaaaaggggtgtaatattgtgatgaatatggttgtgtcacttgcaattgcaacacctttgagagtcgaatcaaaagacggttacatcctttgtagtcgcgatatggggaagagtacgaaagcaatggaaatctgactcgcgggtgatcgcaaccacaactacgcggcagttgttagcagaatttcctgaagcgcgtcgcgagtatgagccagtgtcgcgaactcgagcagttgcaaaacatggaaagtaaagaagaaggatgcgagttgggagggggagatcgtacaagaccagcagagataaggcaagggggtgaagaatggaaagataaaggcagtcaggcggcagggagagacttgagataaaagaagcaatgcatcaagtagaaggaggagaggagaggaatggagtggagagcaattgaaggagggggggaagataacgtgggacaagatctgacagcgagtgtacctggggccattgtacattatgtatccccagtgaattctattgtttatacatctgtaacttacatgtatgttactggatatcgtctcatcatcatcacttatcaccatcgtcatggttcccagatggtggccccaattaattgcatctgtatccacacgctccaccgccgcgggtctggatgttatccgcgtaaccttgtattaattgatggtatgatatatgcatcagatacagatcctgaacggcatgtcccctctagacagggatcctgaccacttttctctcgcgtatacttgccccccccctaaaccccacccttcaaaaacctactgggctcaaaaaaaaaagcgaccacagacaactaaccgttgatgtggccaatcactcatgaggcagaccaatgatgacgatgagatttgccgatatctccctcggaccagattatagccttgtctgtgcgtctggggagggggtttccaaggttcttctcctattctccttggttgatggggaacaaagaacttccaaggttatcaccccgctcgagaggatatcaggatccacatcggatgaaaaagccctgccaggtcgagccatttctcctgcatttcgtgtccatggaaacaggaaagtcaatttgccaatccaaaaggattccacgggcactccgtaattgatgtatatggtaaacgttctccatacacccggcagcatccacccgggcatatagtactgaatctcaattttcagatgttcccgagggtggaaacattcttgaaacatgatacatcaaatgaaaaaaagacccaacccacatattactgcttcgagacatctaaaagtacttatatccagtatcccataactagttacagggtggaacgaactaaccccggatcgccactgcgatccactcgaggtgggggacatcacaacgttagatgtaatatgcccaatagtaaacagatgcctaatcccgtcaatagcccgtcccgaaacaacacccttgatcttgtgatgggtatgcctcattgcaggtgcccaagattgggaccgggtacctaacaccgtcgcgccagtgcctaataacaagcctatgtaccatctatatgtcggcaggtatacccaggtcgcgaatgtgtcaatagcagttaagtcgtcttatcttttccctagcgtatcgctggatatttccgccataccggagaacccatgtcaactctcattggtcacctatatcttacaactcctgagccaacggccatagagaaaaagtgggctgtgtcggacggagcgctgcattgaacgatcgggcaactttctgcagatcctgcctcgattcctaccacgtctgcagatcccagctgtcctggacatcatgactaggtgcatactcccttcagtcgggttggtgagctatgtccagaaagtttacgtgtcactaggaatggaataccacctatgttaccagcgggttggtatcaatattatcagtgctgtgcctcggttaaacgcccaagtcggcaccggcaccggtatttggggatatggatactctatgcgccagtcggaacgtgcaggaactgcacatcatcgggcggaaacaaaataggctgttccttgtcttggatctgacacatgttagctgccacagacctagtgcttaccttagttgatatatctaactaatgcacatggccgtttgctacccaagtagccggttaattccatattccagtgaagccacatgataactgagtctcggtctggatagggaattatgcatattggctatggcctgcgccacattacttaggggttcactaacccgagaaagggtagacaggttgaccaactgtcttgactgctgcctatctgacttggacatagtcttgaactattaagcggaagtcgaaagcccaatttcagtcgggcggcatgaagaacgacctaatgagggttatttcggtggcccatgcacaagggactatgtcgtgcgaggcgggtagctgccgtaccttgtttccctcgcgcttgcgaggtattccttcctagtttggtacaccggtctcgattgaaattttcaagaactgaccagtcttcattagtgatacgcgacagacttagtccatgtccagggaacctggtcagtccttgccctttcccagatactgggctgcaggtgttggtgttggtgttggattattggactttaatggcaccttctgcatgggcgacatgtgactagctgagtacatcatccagcccaacagcacaaatgcctcatataatatgcgttgactgagattaacatgatcaggcttctatatttttcattggacagacggtcaccatacatcgaggctgatagacatgaattgctctcaaggtatatatatgattggaaccctattgtctgctcagggtgctcatttgttcgaaaagctcacaccagaatcgccatctacttataacaggtcattacttagagacacacaagctgagggatcctaatacaataacgaggcctttccatcgtcgggttcaatcactatatatatctgcttccacaaccacgtctaacatgtgtcgagtatatgcaacacgataggattaccctatttgctattgcatgcagagtctatgatagacgaacattgcttgtattgacaaaatagtaaaatcggtagggcttaaggatcagggtaaacgatctctacgtcacttatcgtgggggtgagtacctcgggatactctcggccgttttatggaggaaagcaaggagtcagcgaccgaaggtcatagcttcaggggaattatatatccttcttatcatcctgctggattggttcttgcgtgaaaattagccaaaatcagccagagagtgaagtagaagaaacctcggaaagagcgggcgatgactgataagacaactcggtaggcggtgggcaatcaaggtgcggcccaagcgcaaacctctcgcttgtgacgaccaaagacttcgcggatatcatatcctctcttctccacatcctcgtctttaaagtatctcgctttgttccaagtccaagacatgttacgctgtggccagtgacgggcaagagttgctggtgatcccctctcgatatcgccctaagcggggtatctccgacatctgagagttgccttatatcagtcttgatttcatctacaatcccgaacctttctaaaaaatggccatgaatttcgtgacatttaaccaggactatagctatctggctgtgggtgagtctccctccggaattgtttctatatttttgtcgttgaatgtccattgaccgcatttatagcaacatctaagggatttcagatcttcacaactgaaccctttgccaagagctatgaagccaaagaggggaacatcgctgtcattgagatgctattctcaacctcacttgtagcccttatcttatcgccaagacgcttgcagatccaaaacaccaaggtatcttgaatcgttactcattcatgtcattacaggcagtttatataaacatggaactaggaactaatctttgaaatagcgacaatgcacaatatgcgaattaacatttccaacaactgtccttgcagtgaagctgaaccgcaagcgacttgttattgtccttgaggatcagatctatctttatgatatccagaccatgaagcttttgtccaccattgatacctcaccaaaccccaacggtacagagctcttgcgcctgtttttcccctttcattttaagtagttttttgcccagttctgacaagtcaacagcaatatgtgctcttgccccctcttcagagaattgttacatggcatatcctcttccacaaaaagcccccgcagccgcaaatacaccggcgcatgctccccctggaacgacacatgtatctcctacgaccggggatgttctaatctttgatgctgtaaagctagaagctatcaatgtcatcgaagcgcatcgctctcctctggcactcattgcgctgaatagcgatgggacattgcttgctactgcatcagataaaggaaccatcattcgtattttctcagttccagatggccacaagctgtaccagttccgacgtggttccatgccgtcacgaatttacagcatgtctttcaacaccgcatccacgctcctgtgcgtctcttcatccaccgacaccgtccacatcttcaagttggcccagcaaggaccatcgtcagatggctcttcgttgcattctcctccaggtcgggaccatggctctccaccaaatacctatgggtattcacccgaggaagacgagacgggcggggatgctggctcagattcttcctcgcggaggcacaacggcactttgatggggatgcttcgccggacctctcaaaacgtcggcggcgcagttgctgccagaatgggcggatatcttccaaagggagtcagtgagatgtgggagccagcgcgtgactttgcttggatcaaattgccgcgatcgaacccaggccctggtggaaacacaggccccgggccgctgaggagtgtggttgccatgagtagcaatactccccaagtcatggttgtcactagcgatggcaacttctacgttttcaatatcgatctttcgaagggtggagaagggaccttgacgaaacaatactcgtacgtttgaactattctcaatctcggtggatcaagtttaacgttaacactcatatcacagggttgttgattcgaccgataggctgggctacactgcggagtactgagagccaagcccctggaagacaaattaactataaggggatagatctgcccttaacggctccttgctcttcccaacgcctcttttccatgtttctctgttttcggcattggcatttactgccgccttttactatgaatcatcatcctctttttgagcctttagcgtctcaacactcccctcccgacgtttttagtcaggacttcccatctcatacatggtgtattggcgggtctacttcattttgtggctggctatatcgttatatcctctgcttccgaattcaagtcttgaatagctactttagcttctcatacttttcctattggaagaattatatgcagaaatatcttcaaacatcacaagttaagagaggggacttgttggatgaactgggaggctcaacttgatgaaggatgatatgtataagcgcgtatgtacatagaaaacaagcatcgaaagaaacgtgctcaagagtctaaaagttccggcggaatttctgaggaatgttaccaacgacaacttgaatctgctccagcttatcgagggcaatagccgcatcctcctcctcgtcatgcttgcggaaatgttcaatatcctccgggtgggtcaagtcctcctccgtggtatcgtcgccgtggaacttctcaaagtgatgaatttcgtactcatactcaaggtccccatgatgtccagggccgtaaccgagatcgggaagccggttacccgcagctagccccgccagccagtcctcccgattaataaacccagtgcgcccagtgtcgaagatctcaaacactgctcgcacggcatcttgtttcttttcttcactgacactggcattggattcgtcgttgaggccgtatgtcttgcggacttcgtcttgtgaccatgtccccgaggaatcgtagtcgtggaggatgaagaatgagctcgggtcgaaggattcaatgtggtgttcctctagatatgacaatattagcaaggtcaacttctccattgacgcatcgccaacatgtcttacctatcatgtgtcttgtggcccaatcatctgagggggcttcgtcatttgaatgcgagccgtgggcattggcaagtccgctcaacgcaagcagcccagctgcgagaccgaatagtttattgaccattgaatattgtaacaaaagagattcgttcaagaaaacaaaaaagtagacagatttacagtgcttggatagacattcaacggtgtcaggagatatggggtcttagctcgtttgcaatgtttgcactgatgacccgacccgagcatttgcggaatggaactttcaattaatttgctgcatcgcatgttaccccatctatttccctactcctacttccgacggggctccgggaggagtccaattgatctttagtttgcaatattaccttttggaacacattgtgcgatagcaatgccctgagaatgcagggtttgtggtcccgtactgtttcgaagcagtcgtcctgccgctgtgtcggatgtttgagcactactaccaacggggttacctcgcgggcagcaacctctagtaagagacgacttcgaattggaaactctgttaccgcattttacggcagcattttcgccggtgccgccattgccgatgcgagcgtgaaggatcgccgccgacatgactgggaggaaaagattgccgcggtcaaggccgaggtgagcgagttggtggacgaagaggagcgcattctggcgtcattacaatcacgaagagaaacacgaggactcaatcgcctaatacaagcgaggggattcggcactgtcgcttgtttccctcccggaacccaattcccaaccagcttcaacagaatacgggccttccacacagaaagaacacgtttgaacgcggccggggctcgactggtggaaaacaagccagtcgaggaggacgaacacactattgatgagcaggatgagagcgagattttccttccgcaggagacattacctagttgggtcttggaagatgatcttcgtctgaaggctattcagaaacttgctttaaggcaatttgctatccggattttgctacgaccggccatcgcacatcgttactcgggcgtctcaatgaactacgcggcggactttgagactcctcaggtaaacgtcgcgcagctcctggaggagctgaatcgtcttcgccatcggatgaacacattgaaaacaaacagacacgccacatatagcgatatcacgcaggactatgccgcgagtcaattgggcgagatgcaaagagagcgcgaggcccttgatgccgaactcaccaacgacattcgcatctacacgagccaggagatgcctctccaggaactgcttctgcggatatccaacaacatcttgagctcgagggacccggatcgaccaaccgctttccgggtcatgatcatggcatttggccagacccgccaaaatgacctggttgagctgcttctgcggacattattgccgaaccggttcttcctcaacccgtcgctcgtgatcactatcatcacattcttcagaaaatcgaaaaaccttaaggatttcgatttgttcttgaaaatgctcggcggagaaggctactccgtcaacttagggagcaggggggtttataagcaccgtacggtcaatggtatggatctcattgttccatctttaaatagcagcaatcccgtcatctatgccgccttgatagcggcggcattacgtttcgaccagcccgatcgagccgacgcttggcttcaagctgcacgtggtggaggtttctttgatagttgggaaaccctgttcacctatctacggttttacagccttcgaagggactgggataagggcgtgaacgtcttgagacgagccgtgacctacctcttgtcatcaacggaccaccgtgtagattccgtcgagagattgcttgggcgaatggtcggcctctgcgactcctgtgacaaactagatgcatcggatgcattggtaaaagctgccgtgcacagtggctttgatccaagacttatatcacgacagtcggactcaggacctttcgtccatggtgatcacaagcggtggtcgaatgctgcgaagcaaacaccgagggagaacattgatcgtcccttgtggcagaagtgctacgactttggaaacacctttggggaatacctgagccaaattgaggtgccggtagaggataccttcgcgcgacgcaatgccaaactggccgatcagcatgcagagaatgctttatttactgccctgggacgtagcagaacgccagcttccagtgagggaaagacacctgctggcaacacggcaaatgaggacatctccacactcaaaggcgaggttgcccaactccgcgaactcatctatgagcttcgcaagcaccacatctcagacccttccacgaaagactcctcccgcactccgaccagcgaagaaaccctccctccacccgccgaaaccatcacaacccttaaaaacccccaaccccaaactcccccactaagtcgcaatttcaccagaacttcgactaggatcagcctcgccaaatcgcaagtggcatcttcatctccgcggaaatcaagcaagcgaagcaggcggcgacaaaccagcaccgaccaaccatcattggaacgcacagctcctggtgccgagcctgcagtatttgccagctgagttgtggatcttctaaatcatggacattgactgtccgtgtactcactaaagacggaggagaatttcttgtatattaaatgactacatttgtttccaatagagcacacaggaacaccctgggcaagcagccctgaatgtattaaccacccgagggcgttggtggtgcatacaattgatttaaaattgatttaaaattgattccttgaagaacaactcatggtgaccaggcctgagcctctcgagtatattgtattttgatccagtctcccaaattagacagatttcgaagactggttgaaggcaacggccgaaaaaggattgtccgggagtaaatatggtatggagaagagggagaaagcagaaattctattcgatatattgacatcgtgatgagaaggaagcagtgcgacaaacaagcgtatcatgcgtgaattttaggctgaacagaaacaagtggtctatcgacgcttctcggcgcgcatcttctccttgcgagcgaggcgatcagcagcccgagtaagggcggagcggatgtcacccttggggaagctgttgatatcgtagtatgtaggggcgatatcctggacaacagttagtaaatctactggttataagacaggaatggggaacataccaaaagccattctggcttgacggcagtgacagtacggatgtagttcttggttgtgagaacgaattcgttatacaaaacccattcggcctcgtgggccaggacggtggacgggtgcaggagcacattctggttgtccttgatggtaaggtattggctcttgccgcctgtgtccttcttcgcgacttgcataaagaaaccggcgcaaagggcgcggcggatgttctcgtagtacttcttgtcatcgaaggcagtggagatcatctcgagatcctggcgttccatgatgcggagcagctgggagcggacattatcagcggattggagagcccgctgggagaggaagtggtcgtggcaccactgcttggggtttgcctgggcgtcactgcttcggtatgcgtggtagacgttcagcattgtcagatggtctccgtcggggtgggcaaacaggttcttcatctcatcggcacgcttgcgctgggcaggaggacgaacgaagacctgcggtacagacagaagggcggtgatggaaaggatttcattagagcagtagaattcgggagagctgatcaacataacagcaagggcagggtcgagagggaagtcggaggccagacgacctagctgagtaaggtttccatcatcatccagacaggccaaatagttcagttcttccaatgctctcatcagagtctctggcgcaggcgggtccatcaaatcgaagtggacgagatcatcaacaccaagcttcttcagttcgagcacggttgatgacaagtttgaccgcaggatctcggggtaagttgactcaatcaattccttcttgaatgcgccctcggtgtaaagacggaagcactttccgggacgtgtacgaccggcacgaccagctcgctgctgcgcggaggccttggagataggggaaacgaggagtgactcgacacgaatgcgggggttgtaaatcttttgcttggagaatccaggatccacgacgtacacaataccatcgatggtaagagatgtttcggcgatgttggtcgacacgatgaccttgcgcccggggcggccgcctggtcggcgaggaggtggtgcagggtcgaagatgcgctgttgcatgtgaggaggaagactaccgtacaaagggtagaccttgataggaccagcgtctgcctcgcgaaccatctcatctccctcaagcgcgatttttcgtgaagcatcttcaatctcttcctcaccagtcaagaaaagaagaatatctccctcaccttcagtggcgtggatttgcagcacagtccgaactgcggcctcgacgtaatcttgctcaggttcaggggtgtagaagatctcgaccgggtgggtacgaccagggactgcgagaaggggcgcgtccatgaagtaccgctggaacttttgcgcatccaaagtagccgacatgataataatcttcaagtctggccgacgcaccacaacttccttcaaaagacccatcaggatatctgtcgccatggttctctcgtgagcctcgtcaagaatgattgtgctgtagcgcgacatgttgggatcgttcatagcctctcgaagaagcataccatcagtcatgtacttcatgatggtcttcgggccggtcatgtcttcgaaacggatactgtaaccaacttcctctccaagcttgacatccatctcagccgcgacacgttgggcgacggacatggcagccactcgtcggggctgcgtacaagcaatcattttgccctgagtttgagggagatcatcgtagaggacgaattgcgggatctgcgtagtctttccggaaccagtctcaccaacaaagacaaggatctgggactgttggtagagttgtaggaactcatcactgaataaaatggtcagtatatatatttcttccggaatggctgtcgggcagcactcaccgttgcgtatggacaggcagatcgcgacgggtcttcaggattgagaaatatttgctggaaaaaggtcggccactgaaagggttgatatcgccatcttcggcctttttcgccatcgctgcggttgtctggtgtcgcttgaacttggccagggccgtgttgtcggagccattgttgttctcgtacatgtgagcgaggtaggggttgttctttgggtccccagcgtccatcttctggcgcttcgctcgcgcgcccccttcggaatcggatcggttatcagccatggtggaggtgaaagcaaaaagagtgttgaagggcaaactcgggggagagaagaagctgagataccggagaaaaaaaaatatgagataggaaggtcggccgagcgccacaactgcctatcaggctcaccgccagactattctgccgctctccacaaagggatcgataatctttgagcttgttgacgccctgtgtgtttttggctggacttctctgagccagtttgtctgatgcacgtggcttgtttgcataggactgcctgatatcaagcgtattagctcctctattgctcatcacgagcctttatccacatccctagttccagaccacccccaccattgcgctagacttctgtgtcaatatggagagctacaattcttcagaagatcccgggccagctttctgcgtcgggcaccatgagcacaacagactagttactgtgacccctcgggtcatccaaaacgtacacgagagtaatgttggttctttttcttacctgtaacattactttcataaatgctaacttgatttgatagtatgatatgatgactgttccgatcacgacctctcatttccactcgcgcgtcctagggctattgtcctcttatttggcgactctgcagtcgccaacttacgatgttgttgggaccatggctaccaccctgaacactcggcctgtggtggttccaccgctctcgaaggcagattcgtatcttaccccgaatgatgcaaccagccaattggttggtgtaaccagtagctggattgatctatgctctcctgacccgttgattgcagacttgtcccggcaagttctgatgttggaagttgcgtatgctgcgttttgcggcattggatatctgttgattcctggccctaagttgcatcacggtgccttgcattctgagggtgtcatctactatgcgcgcgcggttcaagacgctctagacctcggtccctacattcaatttcatatttggcagcagatggttgacaacccagaggctgaagttgacacaatgggcgacttggcccctcttgctcgggcagaatacctggtgccagatgagggggatccactcaaggttgatccgtttgggagttgggatgcttgggattcaatcagaaagacttgcaaataccacgcaagactgttcgttggtatgagctaatcctccctttcaatggtcatcgccattatgacaatattttgaactaaagctaatctgaatcacagccctttctttgccgaagcaactaccgtctctgtttgtgcaatcccgatggcattcggaaccagtgcgtttactgacgattgatggctcgacgttcctcaagaaccagaaaggatacccagtcttgtccaagtcacaccaaggtttgatcgcaaagatgatgcgtcttcgaacggcgccatggattatcctttgtggtgttggtcctatccctggacttgagaatgtcgaagaccctgataccaacacggcttcgctatctgggtctgactatccaagtctgtcacaggctggcaagaagcaccacgaccccactccacatctctcgtatattcgcaatctgcagcagcgccaacccccgcggacagcaattgagagatttggtgtgggataccaggactacttgcaggcacctctacagccgctcacagtcaatttggagagtatcacatatgaagtgtttgaaaaggatcccatcaaatacgagtggtatgaaaaggcaatctacaaggcattgagagactgggccgaccagaagaaggccacgtctcacccggacggaaaagtgattctcgcagttgtgggagctggtcgcggcccgctagtcactcgcgccctgaaggctagcgcagatgctggagtggatattgatctttgggcggtggagaagaaccagaatgcgtttgtgttgctacagcgacacaacgacacaatttggggtggtaaggtcaccctggtccagtcagatatgcgaagttggaaaggacctctggtccgacagcagtcgactacggtcgctactggccctgtgggcgaatcccttgggatcgagagctcgttacttgagtctccgaaggatggccagcatgatcggccatcagaaatttctgaatttcaggcgtcggctatgtgccacactcatgtcgatatcattgtctcggagctgttgggctcctttgcggacaatgagctttctccagaatgtctggatggtgtgaacgatgtgatcaaccccgtccacggcatttccattccagcctcgtattcggcacatttcactccgatctccgctcccaaattgcacgcggatgttgtgcaccagacggtgtccaacccggccgccccagagaccccatatgtcgtgatgcttcatgctattgacttcctctccactaccgagacgcctcctagcgctgaaagctccaaccccaataatggaaaccgggcatccaccccgtcgtcgtcattctctactactgaattccccactccctttgtgcagaccgcatggtctttctctcacccgaaccgacacattcctcctcagtcccccatgcagtcgaccatctccaacgcccataatgtgcgccaaacacgtctggctttcccttgccagaaccgaggtgtgtgccacggtctggcgggctactttgaaacagtgctctacggtgatgtggagttgtcaaccaacccggtgaccatggatgccaagagcgcaagcatgatcagctggttccccatctacttccccttgaaggttagtatttttgaaaccttccaactaaacccctcgcttctgtccttcccatcatactgacaacgctctcaagacccctcttagtgttcccgagaacggtgagatcgttgccacgatgtaccgtcaaaccgatgaccgcaaggtctggtatgaatggatggttgaggtttatgcccttgaacctactggggcattcgcaaaacccacccccgtgagctatgcgcaagctgggtccgtcagcgtggaaagcctgaaagctaaggaaaatgccgcgaagaagacccaccgcaccggctatcgccgcgtgcgagtgggaatgagtgatttgcactctagcatcaaggatggctgcttaatgtgaaatttataagccggggttgaataaaagctgttcgagccatgagctccactattgttaacgattactatcacgattgcagttgaattttgccgtttgagaccgtcaaatctgatcatgcgaacaacgctaagcactttgttctagaggttcttgccaagtaaagtacggagtcaccttgcatgtcttggcagggacccgattttaatcaaactaacttcgggctgagctgagcagttcagccctggctgaggctggaagcttccgatctgtagattttcatgtgagataaacatatgtcacgcactccctatattaatgtgattgtatagagtactccttacttggagtacacctggtttcgggttcggcgttgccttacttaaagcacacgcgatctcagattctgcattgccttaatcgccggactgaccggaatgaaataattccccggctccaccaatgcctccaaatttgatctatttcgtcgatcattgtgtggaactgtgctgaattccctcgtcacggagactagtatcgtatttttatcatatgccgttgtttattggttcccccgacaggaaatggcttgcgcaagtgtggaacccattcaggaacatactgtatgaatttgccaggggggatcgaacatataaagccgtgggtccccctggcctcaattaggcaccgcgattgacaacaagccatcatgcgtttctctttattcacagcgctatctgcagcagcatcgttgggtcatgccctccccggtcaactgcaagctcgaggtaccatgccacaaacattgatcagtgcatcttgaccacctcgctcacacccggttagatgtttcgactagcgaactgaaccagttcgacttctgggtccagtatgccgccgcggcatactatgccgatgactacacagctcaagtgggcgccaagatcagttgttcgaaaggaaactgcccccaagtggaggaagctggtgcgactgtattctatgacttctccaagtaagcgacgtccccgatacaatacccgacaaaacaatttacttacacatgcacagcgccaccatcacagatacttccggcttcatcgcagtagaccacgccaacgaggcagtcgttctctccttccgcggatcctactcagtgcgcaactgggtcagcgatgccatattcgtatacacaaaccctgatctctgtgatggatgcctggccgacctcggcttctggggctcctgggtgcttgtccgcgacgacatcatcaaagaactgaaagaagccgtctcccagaaccccggttacgagctggccgtagtgggccacagtctcggtgccgctgtcgcaacccttgcggtggctgatctccggggcaaaggctacccgtcggctaagctgtatgcgtatgcctcgcctcgggtggcgaacgtgcctttggctaagcatatcacggctcaggggaacaactaccgcttcactcacaccgatgacccggtgcctaagctgccgttgctggccatgggctatgttcatatcagccctgagtattggatcacctcgcctaacaatgtgactgtcggtgcttctgatatcaaggttattgacggagatatctcatttgctggaaacactggaactggtctcccatcattggaggatttcgaggcgcataagtggtactttatgaagactgatgcaggaaagaatgatgggaggccgttcaagagggtttgattttcttgtcgaattttgtttaatagattctagaattgctggctgacattaatatgtataataaagaataataatggatataatttccgagttatgcaaggccactgggcagaatgtggtctgagatgtggaattgtgtagaccgaggctatcaatatgatccccaaaacccaactaagcactaataagcttgaatgataaccaattcgcctatttccgggcttcagaggacgtcgagtcggagatccgtcggctttagaccaaaaagaccaaactgggcgatcttagtagtttctggccgtcccgtttgatcctagcaatgtaaagtggatatctcctgccgagcggggttatctggaatcaatggtataagatatggctcgaatctcggatttgattggggatgtccattcaaaatggtgctatatccgaaggttttgttggcagtgctggtaagtcatgccacggcacaatttgtgcccgcacccaccgacttgatcaccaagacaggacacgccggcatcgatgtgcgatataaggaagtgcctcatgggatttgtgaacaagaccccagtgtgaagagttattctggttacgctgatgttggtgaggacgagcatattttctggtaagcattcgcgatagggatgagccccagacatcgactgactagcgcaggtggttcttcgaggctagaaacggagatcctaaagatgtatgtccccacggcgtttgagcattgatcatgtgcactaacaataaacaaggcacctcttacagtttggatcaatggaggcccgggatcatcgtccatgatcgggctattccaggagctaggcccctgtggagttgatcacgacggaaatgtatacaacaacccttattcttggagcaacgtgagcaatatggtaagtttgcactgtctttgttcgccgggactctagctcaacttgtcactagctcttcgttgaccagcctgccacggttggactatcatatacaatcccgattccagcctacgaggatgacgatggcaatgttatccagttgcccagcgaggagtgccccgattatgcccaggaccttgggacatgcggcacatactccaagccagacattgccctagtccctaatacaactgcacgtgcggccccaaatatgtggaagacactacaaggattcatgggagctttcccaaagtactcgagaaatggcttcaacttcgccactgagagctacggggggcactatggcccagtcttcaacggtaaagatcgcaaacacttctaaatgcgactggcgctaatttcagctcagagtactttgtcaaacaaaacgcaaaaaagccccatggctcgattcggatcgatcttgagaacgtccttattggaaatggctggttcgatccgctgattcaataccaggcgtactacaacttctctatcttcccgggaaacacttatgactacaacccgtacaacgagtcggtgcaggccgaatggtacaacaatctttatggagaaggtaactgcgtcgatcggactcgggaatgttacgcgacgggtcgaaacgatatttgctctgcggcggacgacttctgcgcttcgaaggttgagtcgctctttgatatctactcagggcgcgacgagtatgatatgcgagagttgacacccgatccgttcccatacgaattctacgtcgattatctcaacagccccaaggttcaagccgctattggagcataccagaatttctcggagttctccgggactgtgggcaatgccttcggaagcacaggcgacgacgaccgcgagtctgcgacgatagagaatgtgaggaagttgttggaagctggagtacaggtattgctgtatttcggggatgcgtgagatctcccacatgatgagatgactagcctatgctaattcgagttctagcgacttcaactgcaattggctcggtggacaagttgtggctgaggagatcaatgccccagggtataatcacgcaggtttcgtgaacatcaccacctcggacggcgttgttcatggacaagttcgtcaaagtgacttgtttagctttgtgcgaatttacgagtccggtcacgaagtacctttctaccagccattggctgcgttagaggtgtttgagagagtgcttttgagaaaggacattgcaacgggtagccaccatttgaagccacacggcggttatcgaactcatggaaccccgacaagtgactaccgagaggggaacagtacagtgattctggaagtgctggatagcaatacgacctataacacaactctcaatggaccgaacccatctagctcggcttcggtcagattacgcagccgacggttgagaagtgtttgaacagtgtacttgtgacgcaactgcgtttttttgtgagatatgttccatttcaaagattcaaattagaagacaaatggtatggtgaagccatattttccatgtccgagtatatcgacgccgcagtgaaacaattcccagattacattcctccattcgattcattccgttctctctcttgggaagtctcagttcaaggcgacatgatgacacaagtagcgatctactcggtcaggtcagcagtgtcggcagtgtcggcagggtcagcgtcgctggacttctcgtcctgagcccgctcaggcacagacttggtggtggtcttgcgacgcttgggagctttatccgccttcctggaggatgtgtctttggccacgccacgcttggtaccagaacgggacttcttagttggtccaccgttggtgtcctcatccttggaattgacagcctgggtaggagactgcactttcaaaccaagaattccctcaaggtggtgcttagcacgccagtagttggtattggcggatgtcttcttcatactagcgagagtggcaagcttctcggagtcaatctatgaagtaaatgttattagacagaaataggaggcatgatgtgagtctggatactgaccttgccatcgtggcataaagaaccataaatgagcagtcgaacatcagctgccttgagctcggagagcttgtcatcaagcttgatagaggaagtcattttgttaaacttgtcgattggataagtgagcgatgagtcaaaccggtgataatgaacgaaagtggatggatgagaagcgataaagaaacggtgagggaacaacgatttcagagaaccaagaagagagaagcatgcagaggaacaaattcaaaataagagcgtgccagatgtgatgatcggcgagaagatgtactacctattagaaatgtatcgttgtttcggttactgattcttgcaatctagggcatgatatagcttgaacgtttctaatgtttaacgcctggtatgaaacataaattagcatatattatgatatttatcatctacgcacactcacggaactaagggatacttaggaccaagacccggagttctgtgataatatggatatggattttacagactgtacaacaaattgagggctagagttcagggcaaataggaattatactaaatgggtatacaagtaagatagcaatcagcttacttgggggccctcttatacttcgaatttcactagtagtattcactaaatcacagtttcgagattgtatgctgcatgaaaaagagttgcttcatgtgagctcctatcaagataccaattcatttgcccaacttgcagtatatcttgcgaaactatgtagctttctttgatcttagtgatcagtttataagttccgatggtgaaggtgatcctttatgtggctgtgccaactacgctgccctgcgaactgccctgcaagcctaagccacatcagccacaccagatatataaacctccagtaccccttcagggaatatgtgtttgactcatcatatgaaaaccatcctagatttccgataatatattcaccagtctaatatacctcgctagtctacaacttactcgccacagctattcacgcctttcgatgtgcccaatacaagaatcggccaagagaaaggagactttaaatcctccacggctttcctcggtcagtgcttagaattgctcctacaacattgcatgctaatttgtcttgtctggttataggttattgaagatctcgacactatccagcctcagacacgccatgttgataaggcgctggaaaaaagtcgggactattggtatcgcctgacatcactagcttatgcctatcgggattatggcttgaatccagagtacacaaaccctcgccacattcttcatagaattccaaaactgcatgtacgacccgaaacaacgtatgcccgcccttacggagtttctcctcttgttctttgcatgcaagcatcctcgacttggaaattagtaggaaactcggattgcgacagcattgcgaaaaaatgacagccgatgctatgctcaaggtcggcactagtgttgctattccctatagtttcgaagggaatgccttcaattcttggattggcacaacggaagaaaaaacacaccggtccaaactacttggggatcctgacaattggatggtgttatgtactctctgcacgatttgttgaaattcaaggcgagggtgctactatgcaatatacagcctcttagatcgaaaactacgatgaagactcttgcgacctgccggagactgatataatcgattttagggcagcagatgaaaatataacttggtggtggtatgcaatactagctcaacgagaagggtggaaagccattatcaaacgaacccaccgccacgaatttctcgccccgtgggcggtgtcacagacatgcaatacacgtttcgctatcaatcagaagggactctcgccaacctcctcatatacacccttaacctcagggaaagcttttgatgttctagctgggtttgtacagttccataacctgggtagccaacttcctatcgcgcctatgacagccataacgctcccaacacatgaatactatggctcgactgtctaacttccctttccaagagcatctggtggtcaacaacctacgactcccatggatgttattccatcactttggtccagtttatacgaggagctgccctactacatgactctgagctgtagtccggaagtagtgctatctactctttgtggatcattcggcgagcccgaagtcccatgcaatctcgtcgctccctggctgcatccgcttttcgaagagatactagctgagacatctcccacgggtagccacgattacgaagcacttgttctaatcggtgcaatacatcgacctaatataggtgctctttggattgtagcggttgccggcgggctaaccccaaaaattattcaaaaagtaagaaaaggcacgtctcctattaatgcacttggatttccctggactggctgtcttcaaagcttcattaatattccaggttcgggtccatacacgcatgggaaccctgagcatatctcaaggctagacgtatggcgcttactgcatcctccccaaatcgaggatgacgagctgttgtataaaaccaggcctcaaacaccttgggcaccctgggggtcgtgcttaccaaaggattgtgcccttcgagttactacacatttgaaatgcgctcgacatgagtaccaataccaccattggaattggcacttagaagaaggctcggttattcaggatcaggggttttcaatagcacccctttcgacggttacagaatgtccttccgatatgattggtattagggagcaaagaaggttccctacgagggaacttgatcaagaggcttccgaagaagccacactgtatgccttcctttggtttggcatcaacggagagggtaaaccgtcggaaactatatatgaagatgcctggctcgagggcatttgggaggaagatgaatatgattgggaagacgaggctgacgatcaagattcgaaagagcctgttggtcaacttgaagaccgagtgaaagcctggctgaattcagtcggctgaccaaattgcagtctttcaaatatggcctttattcctttattgaatatattcaccagccaaggtgcacatctaacttcttgccagacccccaactctagcgtaatgagtaagcttctgcaactgactgataggtgcacagagacaatacataagggcgagcgataaaatgtcaatacacactagagaaacaacgcctatcctagaagtagcggtcagatgcctttcccaacaatgttactgataagataagatcaccagatgccctttttagaataccaagaaaaagcaaatatgtatagtgtcaccattttcaagaaagcggtgtgataataggctgtaggcgctgttgggtggcgcaataaggcgcttcgcccggttgccgcttcgaggccaccgaaaccagcctcatgcaagggatgtcacaaacggcgcgtatagaattcgagtaatcaaaatccgccaagtcatagtatcatggtgcaataccatgaccttgggagggtcgttcgtacatctaatcgatagatccaacctacaaggctgcacgcattccagatcataacggggctatttcccagtgctaacacgtggaggagctctttgcgcagaccatgttgtacatcaatgtagagactatgaatacaagtattcaaagacttggggaatctttgtctagattctaatgggtaccgtaataatgtgattatttacaagacaacctcacgaggcaccgagatcgcgatttgtgaataacgtgcaggtagtgcgtattattatgtagagtctttaatgaaggagttcaaattaagttaaatccaatttgtctcatattaacgcattgtcatggtatcatatcggctgaagggagagagaaagacgctaaagcaaatgaaaagcccaaactaagcgtatcaatcgctaatataaataattctcaacggtcgtcggacgggtggttcatctgcactggatgatcctcgtactgcaagtggtgggtgggaggccacgaatagagcggtagttggtcctgaaataattatcagcctttgtgttcttgctggaaacggatttagattgcactcactaggctctcaatctttgccaacgtaggatcgatatcaatatcagagctccaaatcgaggggtccgtctgctggtagggtgacgcaaaggcttcaggcttcaagatgctccggaggtattgatcgatggcagtcaccgtctctaccggcatgcccgaagtgggatattgaggattcaaaagggattcgcttgcgacgggtgagctgcatatatcggtcgtataggaatagggggatgggtggtcgtgagcggatgcggaagattggctctggccgctggaatactgtgggtatggcattgatgaatccatgattccccatatcccgggataactgtcggtgctatccacttggaatggaatagcaggcgatttggctggttgcgactgcgtctgttgttgcaggctcgactgtcgagatgatctgtcactgtgggcgtatggtatgttttcctttggtgctgaagtcgcactttcattcaggtcagtccacggcttcgattattgtcaactgctggggggttactcactgctggaccaaatgctgggtcaagtaatctggacgatggtatgtctttttgcacccttcgtaagtgcaagggtattgctttttaggatcatggctgagctcatgtcgtctgcggtgttcagctctggtaaagacctgtgtcatggcggtaagcgagatgattcattggcaatattagaatggtacttaccttcgaacatccagggcgctggcacgcatggactcgcttgcccttcatagccttgctcacccggtgagagttttcttgtgggggcgaagaaacatcaacgagaggtctgggataattcaccgtttggcttgcgttgttattgtggttggccaatgttgagggcgtgggagtaggatatccaaagccgaatggcggcgtaatggaggcagtagatgtggtgttgaaggacatattgtaggaaagaaaataagctcttatatggccaatgcggctcaatatgccacccaggacgaagtggcacgtttagacgttgtggaagtcgtacgagctcgagtggggagatgaaagaaaggtaaaagaaaggtatatgggaaagggggttaataagacttttattaatgccaacaggtcaacagctcgatgggtgggtgtgtcggacggtctcggtcgtattggatgccgatctggtgcctaatccaaggttataggtacatgggaaagtcgttttcgaaattaagcgcttccccgtctttttccaccgtgtacctaagaaggaggaggagatatccataaaaatgatatttcagaagacggttgaaaaaaaaccgaaaaaaccaacgcgatgacaagtccgcataatcagcctgctattcttgttaagaaaacaattaagaaccaagctaatactaaatagtccgtaaagaaaaagtctgaaacgactcagagcacgcctagtgattataactttcacctagcggggatcttttggggccaaaagcggctgaagcgacgttcggtgatttccgataatgacgggcatcacccccagtcaacaatcagagcctcaatctcctggatcggtcgctcacgtagctgagctggacatctctacaaattcatcttattgggttgtgatatgccccactaggtgtggatcattgcgatgtagagcaagcggcatgacatgttacaacaacccggcaggctgagtcgaaattcaaaccaaccaacacagaagtatatatgtgattggctcaagtacactctggtctaaaaaaaggaaaaaggaaaggtgcgagtcgacgtatacccgaatggttttgattgaagaggctcaacacgccagagacccactttttccacttggcgtcgattctggccaatagaacgtcggtattgtatccacctgggcaccgatccagtctccagtccgaccttgggcacacgggtggcttctatcactctactttatatgcacttacggacttgatgcagcgtaggcgcattgtcgcatgtcactttggaatgagacccggggagatctagctttggagtgttacatcgggaagctgcggtcttagtacgtggggttcgtacgtggggtatggtgggggctaaagcatattcccggcaaaattatttggactcgggaaatagtatcttgaacttttagtcgggtgtgccttgccaattgagaagcgggtcaaaggcttcaagtggtggtcagtgcacatgatacttacagttggccgttcgtcctgttgaatattcatttagacgggatattaagtagtgatttcattagccatgggaactgcgggggcaatcgagagagtgaggatagcacatcaattggactagcttattgcattttattgagacgctactcaggtcgctgactgatcaggcgctccggggttcaattctactcagtgatcaaaaagcggcgagggatgagtactgaaacgaaaagggaagaccaggaaattgcatagatcgctttgatatcaaattaaccagagtaatgcatcttcggactaagttcgttttccccatttcttcgcatgtaaatctgtcaaggcccaatttgcagagagataatcaatgggcgaatcggaaatccagtcgcttatttccttcgtccttagtagtcgccaaatagttcgtcttttcgttgtccgtcatagcgttccatttcttgtcccggctttgattgcgccagacatagtataccttggtcaacaagtatatgaacacgttggaaacaacgagtcccaccagagtaccattgcctctccggtagcggggagcatcatctgatccaaattagaataccgagcaaatgtaaaaaagatgaggaatttcatgacctaccagcgcgatagatattggaagcaataatccccgacgattggacacacatgttatacatggcagccgagaccgtgcgggatcggacagtgtttgagttgcgggagttccagttgacttgaatagcatgcgctgtgattttgtgagccatgatttcaagcagatttgaacaggtgagcttaccatttggatatgacaatagcagagttatcaccgcccacacgcaccacttgttcgcggtgttgatgtcgatcacatataaatagaccaagaaaggaagcatccatatttgcccgatcgtagacaccaaagtcaattggttacaaatctccgatgcatatgtgaggagtaggaggaagataatagacagcacttcgctaggaatgaccaagagatttgtcacgaaagtgccgaatccgaggcctttcagagtcagagttaggtattgcttggggggcaccactggtgtttggaaggtaagtccgatgatgtataacggccagagatcatagtccttgagacttttccagagtagtttaggtgtaataggttctcgattgtgcatggttcttttgcttgggtcatcacgaattactcgattgacgatgatggtttcctctctgtcaatcctgtcaataacgatccggtttgctataagaagggagataacttaccgggcagtgaaccaacccgatttaccccgagaccaattagcagtctggcatggtcctggtggcatcaggatatatgcagatagaccaaatagaagtgtcagaaggccctgtcttcgatgtgagtaatgcgccgattgcaatcaaatttaaatgaggtggctactcacctccagcaaaaacagccagcgccatcccgattgaccttgcacaccacgaagatgtaaaaatccgaatgcgaggaatgcagcaagaatatccgcaatattcatggccgtccaaaagaaaccgagtcgtaaagacagctcatggtgtttataaaagtaggacagatacaatatcacctttgagtctgttagcagtgacccgtaaccagaacacgaataacctacatctgggataaacccgccttgcaaaatacccagcagggcgcggcacaagaggaaagtcgttctcccattcagaccatactgtgccatggcaactgcagaccaaagaaccatttgggtgggaatccaccgatcaggtccaacccatttgctgacgagctgagagggaagctcggcactgaggaatgagagcttgaacaccgtatttccaagattgtagtctggagatagaaattattattgtcagccctagaatatcataagataaaaagataactccgatgctttatttaccatttgtggtcatgttcaactcgggaagcatgttgtcggttagagcttgtgacagattcgaccgatccaactccaagcacatgaacatgagacacgcaaataccatgatacggagatcgatttttcggatcaatttgtattcctcgttccatgtccaccgagccgaggtgtcaaatcggtgaagattctcccagtcggctcgaggttgatattccttcgcggtgtccgggttgtcaaaaacggacggctgagtcgcaattgcttcggggttgtagtctttgcctcgctgaaaccaaaaccgacgttcatctcctggctcacccaacggcgggatgtcaagactggtagatgagtctgtatctgtccctttgagtactgttatagactcatccgggcctttctttgtgctgtatacagtggacatcttgacaatccaaagccaatgtgggtgaattgtcagaataatggaacctgtcgttctacctttaataaatttggattatctggactccttttatacatccctgcagcgacgatccaatcggggtatattgccttgaacatgaatttgctgataagagaccacttgaaactggcttgcatcatgaagccaagtatggaacaattcttctggtgtgttgtgagaggttcgggttcagggccaagaaaggtcaagagggttagtgggaatggcatcttgatggctgaatatcacatcattctgtcgaaaaaccacatcttgcccagtctaaaagcaaactagaattatgttcaaatcagctactgaggtccattgaacagctgcgtttaccgagaaagacaaattgccaaataccttgagattattttgtttctctgcaaaactactcatcggtgaacggcaccacaaatagaacatatatctcatattgatcgcagcgtggaagcctgagaccagttataaggcaggaccttatccattgtagctacttcatgatgtcgtttcatcgatgatgcgaattggaaccctcaggagcgatttcaagcgatattgacagaccaatcaatctacgcgtctaagatggacagcaagtccggaaagcgtgattttgcctttcttagtcttggtatcgtctgtattatccacttcgatcctaccgtccttggggtggcaagcttcatattattcgaaatttggtgggcgccctataataaaaatgggggacagggcaaatctcatcctttaatctcagaagaatcatgatagaagaactctcgacgtatatttacttaggggtccatttgagtatgacttcgcttttcaccaagtctaccttatggtgtcattggcccagtccgtcgtcttcggaggtagccatacgtcctcggctttttgattttcataacaattgagagaacgccaggtaaagactataacattgcggatctataaagctacggaaaggcttcaagaaatctaccgcggatcgcttttcgtgactcaagatctagctcccagaattcttctgcgcttagaaactccctggggacttagaccacatacgtgacataacctccggtcgatattatcttcgccttgctttccatcttgataagcaaggcaatcggggataacatcgcattccaatctcttgagcgctttcagggtcgtcaattcaacgtgcgactgtggcttagaagcctgatttcgtcgaatctgagggctctgatattgagtgccaataacaaaaatttgaagatagattttccttgcgatggccaataaacttagcagctgtgaacggaagtccaaggtcaccggtaacatcctgctgcgtcgtcaattgagatcgtccagagagcttattactatcgatggcccaggtttggcggggcaggtggagaggcggctcggatggtgggtggatcgagagtgacgtccgtgccttcgaggccgcacaggaacgaagcggttttgggaatgttcatgctggcttgatgagttttggaacgatggacatattcttttggcgaatgaaagcctagtagagctggcgtttggataggagtaaagaagacgagagttgttgatgggaaaaatgatcatccactaaccggccccctgaaatttttcgagtaatcactgagcgagcagcgagccaatcatgctctctgatttctcagtgagcggtcatttggcatctctgatatgtcacctgttggagctgagcaggttactcggctgtcctgaccctgagcgccctcatgaagcggcagctaagaaaggaaagccccggcagaggaaagattgtacgaagaggtcccgaggtacatagtccgtcggctaagcgttggtgacttccctttttgttgcgatgggccggaccctatgtacatggcgtgcttgagtgcggagtagatgtgcatatgtacatccagccaacaaatagtgaaggaaaataatctagaagtccaactagttatttcggattgatcagattcagcacatcttccggctttaactgctgtaggaatagtgtcgtttgtaatcaagattctactatgttgcaacctctagtagatatgatcccatcacggtgacatttccagatggcggcatgtcagacaattcctgggggaaatgacgaatatcaactgtgacagcacaagttgactgttatctatcaagaagatcaacatctaagacgtgctttcgctctaactgtgcgacagcaatgttccagaactgcggggctacgataatgagggctgggcaccgcagcagacagatgtcgcaagcggataatcggcaatacccagtatgtcacggagtataagattgatacctggtcccagctttcatcttctagcatcaagcaacgctatccaacaactgctgtatccaacacccttaccatggcatccgctgtcacccaaaccgcacctacggtggttcccgttgtggaggataagattacgctcacgggtctcgcacgtgaacctctcaagtccagcggaactctcgatgctttcgaatactttgatgtcactccagtcattgggcgcgaattcccaaatgccaacttgaaggacttcctgcgcgcccccaattccgatgatctgcttagggatcttgccctaaccagtaagtcgcatccgtggctatgcgtgacagatagagctgacatgatatcccagtctcgcaacgaggagtggtattcttccggaagcaagatggtctagacaatgacctgcaaaaggagcttgtccaacgacttggtgaactctcaggcaagccaagcacatctggactgcatatccacccagtagcaaactcgggtcgggaacacagcgtcaaggacgatgagattagtgtgatcagctccgcaagccgggaaaagctgtacgaaaccagaaacaaacggaaacagactgcgcgcagagagtggcacagtgacatcacctttgagcccattcctagtgattatactctcttgcgtcttaccgagcttccgaaaaccggtggtggtaagacctcattgcgtcctctctatgagatagtccagggacactaatcctcttctagacacattgtgggcctcaggatacgaggtttacgatcgcatctccgaaccataccagaaattcctggagagcttgaccgcaacctatgcgcaacccggcttcaacgaagttgccaagcgcaacaatttcacaattcaccttggtcctcgtggtgcaccggaaaacgtcggagaagatctcattgctgagcaccctgtcatccgtaccaaccctgtcaccggttggaagagtgtctttgcagtcggtacgcacgtgcagaaggtcaacggtgtctccgaagaggagagccgccatcttctcgactggtttgtatctctcattgttgagaaccacgacctgcaggtgcgcaatcgctggcagaaccctaacgatctcggtatgaccccccggtgaaattttgtgatggccgtatctgactgttggtatagctatttgggataaccgatcggtataccacgcagcgacttgggattatgacggtctcggtccacgcactggacatcgtactgttgggctcggagagaggccatatctggaccccaagagcattggaagacgggaggcactctccaagagcgaataggtatttttataatccgcattggaagatcggccttctcgccatgcaatttaaatgaaactcttgttcttgaacacgattcatatgtgcgacacatagtatccaatgtctacatgcatttcctcaaaaggttattccttgggacaatccacccatgggtccatttcaggccttgagacgcggtgacctcagtttcctagtacgttaatatttaatttcctgacctcgcgaacaacttgataaaatggcggatgaagttagaaaggagttcggagctagaaaatccccgatcatagcaagattctttacacaaattcaatcaaaaatccaaatatagaaggcaataaaagagctgtgctgaagccatatcagtttatgtacatcaagccggctgggagctgacaggtgaccataccatgcaaacagagactattcccagggctacataggaggtaaatcaccaaaagacaagtttgggtcccggattctagaacccttcggaataatactttctcccagcactctcatgttttctatccgtaccctccggggggaagtcacgtaaatatgggccttggtacctcctgggttgaggaagagtgagcaatggcatggatctggctttgtctcgccacttcctgtcacggtggttgaatcgtagcccctgtagaataattaggatactttatggatgtgatcgagcctaggatttaatatggcctcatacaagatgcggacagaggttttccctatccttcgagcacatgcgacagccacttgctcggtggcactcttcaatacattcaattccgcctggtaggttgcagcgcttccaggtaggttgaaaattgcgtttgggctccaaaagaaactgataccgtcaagggtacccgaataggactcggcggggatggtgttctgaagagacatggtagaggtgagaatattaacgagataaaatgccttaggtcttttggatgtgaaaacagagagtcaagattgatggttcctcttggatgatgtctccaacgcctatatatatatatatatatatatgtagaaagtctagccagcaggggccattgaggtcaaagataaaccccgctactttccctcttagagatacgttgcatagccaatggatacgcgccgtacttgaagatcatcatgtcagagctatcagagagcttttgctttccaatcagtttagtcgcacggtactacaaagtacaagtgtttcatatctcaagaattaatcattcaaatcccagagcattagtcttattgggtatagcttgttttcgcgtgctgctttgatagtgcaattatgctcgtaagcgctaggacaggacaggcccgagtttatttctgtcagtacgtatgtattgctacatcgtaatctatttttatcttgttttatcttattttaatttgatctcattaggtttccttttgactgggggcggatcggcatcgcatggctgcgagtaacttttctctgcgactgttcgttggagaacatagtattcgccccatttgcgattcaactttcatttcaacgttgtctccgattaatgaaagggttctctaaacgcccaagaatgtaaatgtgattgttagggtttcaagtctcaagaaaaggtcgatttaaaattacacaatccctgggaccacgaccattttgaatctgaagaaaaaaacctcactattaaaccgattgctcgccgacctcgggagcattgaatcgtgtcattggttgtcccttaagactgtcaagagaatcatcatgtttcagcgaagcgccactagttctcacaagtacgaacagaagcggcaggaattaaaatagacagcggtgatcctgggcccaagcgagtggtgacatccagaaagaagggattttgggctcagcgcatgaagttgataatttgcaggagccaactatcactgggcggtgtgacgaattggcacttatacaacctgatctccttctgccttaagactcacctaatcttcttcattattcatctactctgccatcgacacattcatctgaaatggccaatactgaagcttcccctgaaaacacgacagattttggtgactttgtgaaggatgaagaagaggaacttgatctcgaagagcttgttgagccatggtataggtacgacacagaggataaccaacatttcctctatcctattcaccttggagaagtgctcaacgacaggtacctggttgaacataaacttggctttggtggtggctcaaccgtctggatggcatttgacctacaagacaagagaaacgtggcccttaaagtcatggccctagggcaatggggcgacaatgaaactcgaatccaggatgagatcatcaaaacagtacaggatacttctcgcctggttatatatactgcgactttctttctaccccgagacgataaaagttgccatagggtcttggtgttccctgtgaaagggccatccatctgtactcttaccttgcaaaagattcccatggcctctcgcatgtttgctgctcggcaattactagggactgtggcaagcttacaccaagctggaatcatacatcgcggtgagtcgacattctcttgtttgattttcttttatactgagaaaaatgttatagatttgaatgcaaggaactgtatgtggggaatagctcctttcgatgatcttagcagaagcgctaagtatgaattactcggtcggcctttgaagcaaacaataccatttgtcgatctgtggaaaaagggcgagcttgtgagccctatcaaatttcccgaagaccgtcgcacagatgaattctatctctgtgattttggtttagcaaagaaagtaggcgatctcactagccaacgtggctacccacctatgcattattgctctccagatcgacttcataagcaagagccaagttttgcttgcgacatgtggagctatatggctgttttctctatgctctaccttgaatttcctccgtttcccacatttatcgaaggtggagttgtgagtggtatggttgaatgcttaggcccactacctaagcagtggaaaggtctctacaaatactccgacggccttgactcatggtatgatcagtctcagtctcctgatctagagcatgaccttgctgcgaaaattgcttatttccgtcccgattctgatccggtcgagcggcagcatgtgctttcggtcatgtcgaaagtatttatctacgacccagaaaagcggctgaccgcagtagaacttttgcgagatccttcattcagagccatcatggaccggtacaagtgctgagactcgagcactcgaagagcatttgcattttctagccacggagcgcaagaaataatctgcctggattgaaatagcttgagtcaagagcgggacgtgatgagcaaacaggtgtcaagctaaaaaccctcgtactgctgtcccgttagctgccaccgaagtcaagccgggatccctcgcgagtcctgcgatgcaatcggggccacctttgtctcagctatctaaacactgtcgctccaagaatacctgagtatctatggtctcgtttatgataacgataatcagcacgtgggctatctcatatttgtttccacggacaatgccgccaagactaagcgtgccgagcgcaagggtaatagcgcgaatcactactcgatacatgaaaagaccaggggaaaaagcatcaaagtacaacataatactattatctgaggcgcctcggtccaatctttagtacgactgttttacccagtgccgttaccgttctggctcctctcaatctcttctcttcctgggttctcccttcaacggtagacatgcgctgtagtaatttgctgtgtttatctaaaaggagtaatcttttgttcaatcacatcccgacccaccatataagttttggctacttttatgtatacatgagcttgatcaagttttatacaatccaacctccgaagacgtcggataagacgatcttatcatagaaactcccgcggggtcttattggctgataagcacctttctcgctggctgttgcctcgtttaagataagcataaagcatgccactcccaagtccacatataaatgtctggtgagcccgacgaagtaacacaaaccgattttaaattcattatccagacacagaacataatgcatcttgctattcctcccactcctattcgcaatcccgaaaagggcttcaagacacaccctaagaagacacgaactgagtctatctcagcaattgagaccgaatctgcacaaccctcttccgatggctcgtcagaaaagtcccttcggtccattatcaaaggtgagttatgtatgacttatttttctaccttcgcttacagtattatagcctttgtttctcgcaccagaatgtgaagacggcggtatctggcagaccaaacatggtctttgattgatttactttcttttgttatatatctggcctctcatataccttattcccctctcgctcttgtggacttctcattggtgtgtgttttacaagtaattactatactcctatcatactcgttgagcctttttatcacaattcagtgcatgacctactcctacttaccaaagaccgggtatgtgtcaaatgccatcaactgcacttgattctcacagctcctcaatattgtcgaggtcaatataccagctcaacttgaggaatcactatccgatgaggatgaggaaacccattcgccagggtcagactccccttcatcgccccagtcccaggcggcgccagcaagaatggtcctaatcccagtaatacagttcatagtcatcgtatcggaagttggatgcttgtggcacagaattttgaatactttgaggcttggggtttgttttgcaatctcagtacccgtcgcaatcatctcactgtataggctcaaggctctccttggctcattacagtgatgactaaatcctgcggagaatcgatcgacatcttggagactgagattgatgataatactctcaatctgcaacggcatagcactgtcgccctgccgaaattcaaaaatctgtggacaaattctacacatgcgtaagcgcacagacctcagtgaagggatctgaagcgccagctgaggacgaatatgtatggcgctgttcatttctgatccgtaggtaccaggccgctcaagaattgagttgggtcccatgatgaaatatattgctggcgaggaatcagcggattgattgggtcgaagtggctgcggacacgtaaagtgaaagatgttaaatgattgctccgtttagccaatgaagtgagtatttcattgaatttcgcgagatcctgctcagcgggccagtccttggggctatgcgcatcaatggtgagctgtcgcaaaaacgccctcaggtttgaatacacgttttcgggggcatgtaccaactgagtcgcactcagcttcaggtcctctagcaggagcagctttgcaatctgataccacaacttgcagaccaacaaacagcaaacttcctgtttgcgaagctgatcgctacctataaatcgaatgatgatacatagtatctcggatggtagggtttgcagtgtcattggaggaatgtgtggagaagcagagtaaccgcgagtttcaagagataccaagacaaacgcacaaactgcacaaatgctgggtggccggcaaggcggtcacccagtgggtccagatcctactagttagcagatcttagatcttagatctttgaatctttaaatgtttaatctttggactgtccaatatttcattagtcttcagttttaagggagatcgcttattatcttggccgtaatcttgtttccacagtatgcagaggatgtacatccagagcctgcatatacagatgcaacagaatccgacaggtagctagttccgtccctcctcttctttcctctcctgtccgtccatcatcattctaccagaatctctcttgtctttctcatacgagttcatccaataagtagatctctattagcaaatcatccgtcgatttctaaaaggcaaacaagaaatttgctcaatatgttagcagacttgaaactttttactctcacaatcatcccttacagtgggtccttctttgcacatgtaactcttgacagcacctattcttactcgggaaccgttggcagacttgaagtgaagtgagattaaaagaatgcaaataacatatctcaactcgtaattctgttcgcacagtataacttgtccactcctcaatcttgttgtacccgttacgggtgtatattttcctgccttcctcgtttatctaggcagttgcaattgctttccaactcgagaagtgagaaagcggagctcaaatatgctcacttcctactttagccgagcgtccagctgatttagataatcctgaatggtgactttctctggatcggtggtcataaaagcatgagcgatatactcatccgctatcaaactcgtcagctccacccactttcgtgatgcggaataaattgacataccgtgggttttcaactcattccaagcatcaacaatcgttttcagctccctgtctacaagtagcatgggcggaatctcctgcttgtcactttcaaataagtcgtagactgtagtaaggtcggcggccatcagagcccaagcgccctgaagcagctcgagcgtttcgacagcaggtccaatcacattgatgatatctgtgacttgggccttggaggcaggtaagtcactggtgcaaaacaactcagttggcaaaaggctgtacttactcccatggattgtatatcgccttgtagccgaacagcaatctgtagcttttctacatttgcatcgatcgtctcttgaatctttttcatgctcgcctccagccgtttgatgtcactttcggcgagaatatcaactgtgacaccagcaatggtgccaatgaacggtctgtttttgatgactttaatatctaacctctggtttgtagggtacccataaacttacatccagacgtagtaggcagtatctttgatcttatcgtggtctgcgagtatgtgaaggagttagtagtgcattctagcgaggtaaaggctagctcttcacctctgtcaatagccacttgtaggtcctggatattcttcctttcctccgcaataacagccgtcaaatgctctatatcattaccctcctcctcaagaagcgattttaggctcttttcatcgccctcgagagtagactcgtacgccttacagtcatcatgaaactgtttcaaggcactcagggtctctgcgattttgtcctggatagatgaaatcttcttctcctcgccgttgatagcacctttgatactcgattccaaatcatcaagagtcttttgatcgggggatgccttttccatttcgtcgttatactgtccaatccattctaacatgcctcgataatatgagctgtcgcttgttccccctgctaatgtggcatatgttttgatcgtacccgagaggtccacaaggccattccaggtaacttcctggaaggtggtacaactgctcgacacctaatatgcgagtgggagattagcttgtatattctgtccagccagctagttacattgtgcacgagctttgacttccatacatacctcggtataggttccgagtaggttgtccacctctttccaaaccttgtcactcatctcgttggtgtcagtgagacccaagactctgatgtaggtctcgcggtcggttgggagcaactttccagtccataggaatctactgagagctaccatattttcatcatccaagaggaatgtcttgtcgtcatcctgctcggcgctgaaagcagtaatcttcttcgttttgttgtcaagaaataggccctttggataccagacactcgggtcattgatgggctttgagggatcgaagctggtcatgattgtcaggataaaggctcaatgtgcgttgataaatcctatattgaggaaaggtgaagaaatgctatctcaaacagtgtcgacgactctgaaatagaaggagacgaaataatagcttacatggctttcctttataccctggtttctggatggctacgttcggtcattttctcaaatggcggtctatctcctctacagtcgtagataccaacacgtgcttctctctgcctgctgtccttctttctggatgatgagctcataggttcggagaacacggtcatatgataaggagtaaataatgaaactgcatgtactatatgaactcagcttcgggtatctatacagacaatgcgggccgagcccttgcattgcgctattgttaatacttacatcttctaaaagcaggatatgtgtatgttgatcattggggggaaagaggggggtagtatcaaggtcgtgaaacctgcatcgggaactccgacaatgcatgcagggatcgacagtggatttcgcgtaatgactcgacgacctcgccaggtatccatctgatatagatctagcactttggatcaactcatggctaattatcgatgacgaatttcttccaagaggcggagtttggggtaattttgatttccgatatgtgcagacggagctttaaccaatttacagaagatcggttcataagcatcagattcgtagagccacaagtcataccgagctacgaataaacatccttgttcaatccaatttagtcctacaaaccaatacttcttaatccgaacctctactttatgttgacttttaaagtctttgtggcccaacaataaaccaaatcacacagtatttattgatttcaagtattatctcattaaaattgaattattatagctcagaacagagtatgtagtaataggtagtttcgattcatcgcgcatatctaggcatcggcagcaagcaatgtgtcacaagttctgatatccttgtaaggcccgcatgtgagttgggactagcccaatgaacgaatacgggaatgcagcttgcaaaagcaattttcaggctcctctgctagccatgctgtactccgtacgactctccacgatgcatgcatcttcttggggcgatagtaaaagccttggcattctgcctatcaggctggagtgtcattatcgaatccgtgacgttgagcgatttactggtcctatgtttgcgactgcggattgattacgcctcttcacacctaggacatcaggtgttccatttgcctactagccaaaatgattcgtgctccatggagaaataacccgaccgtccttccttcctataaaaccctgcctgctgtttgctattcttgtcaaattcaatatcagttctaattcacttcctcggagaagttgtcaatatgaccaatatcgcaccccaaccgagcaatccaagccaatggcaagagtggtatgccacgctggacgatgtgctcgatattcccctgcaagcagcagactatgtgaacgaaagttcggtaataaatctagcgcaccctccaggtattaacctatttgcgctatcaactgattccagtgacagaaacttgccacccaccgaggcattctccttgatgcacccactgtcctcgatttttcgatgcacaacctgtacatctatgctgatgttcttgtcttcccggcgagcgaaatcacaatttctcctgctgcaagcggtattgtgcagatcctagcccgagttctcactgctgcggctccaatcactctattgattccccctggtgatgcggccacatgtgcaatctcgatctatgcgccagttttagaccagccgatatcagtccgcacgggtgattctaagccgataactctggaactcggcccaacgacagccaacgttggtgttatcctaaccttttctggcggagaggtgacggccgactaccagaaaagataccctacagataatcaccccgaactgcaggccagtctagagactgaattgcgcaatgctctatctgggttttggaaaaatagttcggttggcatttcaatctgcgcctatgttgcagctatcactcacaatcagaaggcctattcaatgctgaatactcaggccgcggcgttgggtcagcaactcgcagggcgagcaattgctggtccaaatatgagctacgcacctacattgcctcttgacacatacgagaagactgcaaagttagcattagctgccgcatctgaatttgacgaagaataccgaaacttccaggacaaggcggagtcgctggaaattcagatccaggcgtggaaggttatgctatctcaagccattgccaatcaaaccatgcggatcaacttgcgtgactcggcatttgacaaatatcagtcagctgccaagtctgcagcctcttgtgagacgcagttccggtatgagaatgatgccgtgaagagcgccgagatacaatttcaacttggaattgcggaatgggagttcaatcaggagcttaaagctgtatttgagatattcaaggctgttatcagtaagtcggtcaccttctgcttattctatctatcagtttagtcatgcgattatccaggcttacatgatatagcttttgcagtcaatatcggcgagctgtgtatcggagaccctgctgcagctggcggagcagagaaagccgtggatggcgccgttgaggctgttgaggaagcagaaaagattaccggccagatcgaaaagatcatatcatcgataacattggagaatctgggaaaagctgcaaaggctctatacaaattgtatccgtcggtggtccaggttgtggatgcggtaaaggctctcgagtccaattccgacaccgagatcccttccatgggggatatatctggcacgacagagggtgacgctgattctgctgctattgtgacactagcggcatgggatgtatggattctcgaatcagatcaccagatggagtttgcggtgaagaatgagattgggggtgccagtgagtatcagcttgcattgcggaagcatgcgatcaatggaaagcaactggcccagacccaggctgaagctatcaaggctgggtatgagtatgtccaggctcaaatggaagtcattgtctgcgcaaagcaggtcaatgatcttcagggcttgatagatgagtatacggggcaggaggatatctacctacaagctaaagttcagttatatgatcggctaatggcacttcgaacgggtgttgtgattgaactgcagaacatggtttgggcatatcgatactgggcgctcgcagagagtactctagtcctcgatatcatgaagtcagtcgacgagtacaacagcgatctgtacaccattgcacttgccatggagacaatcgacggacaatacggcagtgattaccaaggtaattagcttatccacccctctctagggctaactgaccgttctgttcgggtagactttgggtacgatcacaagtccgaatacgtatgtactcttgatccttgtgagggttgccaccactgactggcacgacggtagcttcccttggactttggctctttgctgctcgagggcctcactagtgaaaggcacaccggtagctttaccctcgcaccggaagaagccttagccggtcaattcgttgagggctcccactaccgactgagtagcttagacctgactctcatcggagcacgccccaaaagcgaatttctggaagacggtgtagtgaaggtttctttggagatcaccacatcgggaatatacagcgatatcaacaaggatcaggtctttcactttgccagcgtcccctcactcgttcgttgttcttatcagctgaatgaagagggcgacagagggttgacattggaatatcctgttttcaaaaccgaaaaccatgccgagcccacaccttttacacagtggcagataaagctattgcatcctgagagggttgatttgagtggattgacagggattaatttgaattggaaaggccacgttcgttttgatccgacgagacgatctaaagaaatatcgatggaggcttgagatagtagcaagatagtggatagttacctggaatttgtatgtaagccagtaacaaaattaagtcacttttttcatatcaactgctttatcgtcaaggggctaaattctgtaggaattaggtagaatatacgattttttctgatcaaaatgaatgtttttttttgactatgtagaccagaagtgggcagaatatatggcagaaattatggcacccaatctggaaggcggtactaaattttcggggggacaacccgagaaaattgcctgcgctatgaactagacagacgagacaatcatctgcgacttgagctacgaaactctttgttctctctcaaccatatgcctctgcaatctttaatagtcagtctatgatgtatttgaaaattttgtattgacgattgcacagaacaaaaatttgaagctataggggattaaggcaacttaggcataattggttaggcaaaggaaacaagactacatctgtcaatctgacccgtaaactccatacctcagccactgatatgattccttgaacttttggactgcatgtgagaaatcaggtcagcatccgtgaacaatgacagacagaaggatttcgtcataccttctactgccagatcactccacatctccagtagttcgttctcttttaggttgagaagaggcccaggccccggctcggtgttctcggtgatgtactcagtcagtgcagtgagatcattgaatatattgtatgccgcacctaacgcatacttgtcaatctcaaacccagcaactcgacaggggatgagcctaccgacagcgagctgcaggtttgccaacgaggcacttgagtcattttgcatgttctggtttgcgatgattccctattgaatctcactgttagaaacagcgcaaaactgaaggagcggttatatgcatgtggatttatcgaacttgcattcaggatatccagtgctctgcagtcactttcgaaaccctcctgtccatttatgtcaccttcgtgacacttgcggagtcggtcgatagtgtcttgtcgccctagttcctcaccgacttgtttgaccagcttttgtccctcggttacgtttccgatagctgccacaaggttgtcggttgtgctcgtgcactgtttagacaggccatttactttgtccaatcggtctttgatctttgcctgaacctctgcacgcagactctcgttgtctgattcatcgtcgtaaagccttccgaggtcattgaatatctcatctgttttgaacaaagcaaaaagactcagcttaagaaaaaaccaaggaatcaaaaatccgggctattcctaccataatcctcttttgctgtagccgaaagtttgagaatgtagtcacagatatcccccacagaacgatatccgccctaaagcaaacgattagattgattggcattgtcaattatcttttccatacctcaagattcatagactggctggtaatctatcgacgtgtcagtaggtgggtgtgagaaaaggtcagggataggcctgtactgtgtaaaagtgttccatgaccggaattagcaggtctacatacagctataggtatctctagattagttgggatcaaagggattagtttggtagtccttattttacctcttgccttccctgctctgtgaatggcactctatagtcaagcccagaatcattatagggtaaattctgtgttgcctggattgcctgttggagcttgaagaaactcgggccgtcacagcagaaggttttgctgttggtgagtagatcccttgggctgaggaaggattcatcgaacgacatctctgtttttcaaaagtagttgctggattgaacattcgaaaagatagaagacgaacgactcatttatatatatcttcaacgacagaaaatacaaggttcatttgttggactatgcacatatcttcgaggaacaatgagtaacgcatgataaatgcaccgcgatatgattttattatgcatgtaagtctgcccaagatgcaactttctcctcaatacggtaatctgcatgcatacgtgaacccctctgcgtctgcgttgatgatcgtgtaactgtacggaccgtcgtacggatttgaaatgacctatgacagcataggtgagtgttcaagtctacaaaaaggaccattttatcaaccatgagctctatgtcggtagccaacagcgtctatagtcggaaaatatcaaggttgttaagtggtcaagccagcgtaaaaacgccgttttccacttaataacagctctgctttgcccatattcagaattcttagaatttaatatcgtatctctcgttgcctagtgtttctagttttacttggtccacgaagccagagttgaaggccagtgtaatgctcttctctccttgtcgctgtttgatgcttcaaatgaatccattctacgtctggaatcgactacttctggggcttttaggatattaaaagtatatcaacacacaattaattattcgatatagttttactgtccataatggatgaccgcagctgcggatcgggctatttaaggcccgagaatggtactccatacgtagagtgacttggctacgatgcacatgcgttgttctctttgatctcctgtatttccctcaaattccctactctttgtcattctcctagcccctatttgcaaaactcagactagattgaaaaattctctattgaaatgggttctatcgaaaaacactggatatcgtttcaagacatgaaccctgagagcaaccacaaagaagataaaaaaagtcctcgaaacagctaatttcacccatctctgctctgaggcttcaaagatccgccaacgagaagagtccctagattcgctgatattcgccgctcaactagcccgctatgtctatgaacttagcactctccgatttagcaagatcggctgccgctcgtaccccgacgggtccgacgagcttgaaccatcatcattccaaatctcagattcttgggttggactccgtcgacctcattgaaatacttttatctattccgaaaaggccagacaagggaaatccacgaaaaacacaaaggcgaagcaaactgggaagcagccgtttggttcctcgaaaagtcgttgacatcgatggtaacggaggagcatgtatatggcccattttcattgtgtcatttggatcttcacttcaataatatgctcgttaatgaagatttcaacatcactgctatgcttgactggagcaatatccagactgtgccgatggagcgttttgcctcaaacccggaatccattgctcctcctgccgcgccacaggagtttaagcaggcggtctttgacttccgcgatatttttgttgatgcgttagcaaaaattgaaggggagagcggtgcctcatcgtctgatggaggaattccattatcacggctgtttgcatcccccttgtctgaggtggtttttcgatgtacttgtagccctgcacggagagctatcttcgacgctcagctcactctctctctaacttatggtaaagatgctaagtgggaggatttcaagagattcttcaatggccgtttggcgtgactcgccagttgaggaaggtgcattgcgaataggaatattatttctcgccaacataataaaaaatagaggcctactaaagccacaagtactacagcaatagattagaaactgtcaagaacaactggtattgatggctgttgaagctgaatgcaaactattgacattgtatgtcgagaaatcacaataccagagagaatgcaataatacatgacagtaagattcttaaagaagggtagggggattcatatccggtgagagggtagtttgtttcacccgctcaagagccgggactatgacatcgcccttggcagagttagtgatctggtccttgacggccgaaggattaggcgatgtgcctggtgtgcgttcgcccttgccatggcgctggatgagaccgttggtgatgccgagcacagagtcgacaatgacggcgtcgattccttcagagacttggtactgtagggattatgtggtaagacggttgtttgagatttctagggatgtgaaaagaccataacttacgtcgacgttcttgccctcattgttgagtgttccgtaagagacacacacaagaccggactctttgacaattcggactagtcgtgggcagaggaccagtggttcagcctgggtgacgattccaaggagattccaccgtgaggcgaaccgaatagcctcctgcaagctgctggcacggatgtcaccgaccggggaggcgcctgcgtcagtcaagaaaagaacggggatggaaggctgcttgaaagagagcagcagacagatgtccgggttgaagctggagaacagtatgtcgcggccgcctcctaggtcatacaccttggtcaagatggtgtcgacgaaggagttcagttccactgcgtatgtgtccatttcttcctcctcgctctcgtggagcatggggtattctgacgaccttggttagatcgacggaatagctgttcttgggaagctttagtaactcacttagttcaatattaaatccgacaggtttcgggatcttcctgaataattcctccagtgtggcgaatggtgcctgaatgtgctcgccgcgggtgttgcccttgaatcccttcttcttgaagtcgcgtgtgtgcttgatcttttcggtcaattcggccgggttgtactcggagccaccgaccgacattgagcgctggcgcgggccaagctcagattcctcgccgttagttttgacagatcccggcaatgaatgacggtaacgtccgatgcctaactcgaggaattgatcaagtgtcatggtatgaacaggcgcatctatacctgtctcgctgaccaggaagtcgtggtagatgacaggcacatggtctttcgtgagctgtacatcgaactcgacatatgaggcgcccaggttggctgcagcgatgaacgactccacagtattctcgcccaactgtaacgaattgcggccagccatattcttacctagtccacggtgtccaatgaccatggtggagctcatcgagcgccagtaggtctggttgcccgcgatagacattttcgggtgcttgaagggcgtgatgataaggaagttgaacgtcacagacccgatcacctcaagggtattcgcggcaacaatgggaacagtggaatcacctttgaggttgattcggtgcgacccgacagtgggcttgatgctagaaagcagagcgacaccccggccaacaatcttatccttcgatcctgcgtaggtggggatgaggtcgaaaagcagacgcaccttgctaggatcggtagtgtggaagacaattggctcggttgagatattgtcctgcacaggcaagtcaatcacctccggctcaccatgtgcaccgctagctgttatcaccatcgacaaagacgtatctagctgggtggcatgtgcattctccatcggaatgcggtcgaggctgactgtctcaagcggcttgcgcatgtccatagttcccagactgaccaagatcatgctctcatcggtgagatacctgtgtccaaaagtcttgataggttcagtggaccgtacgccaggacctccagaagttgggccaggcgcatttgaccggcgatcagtgagggacgactgagtcgggggcgaggaggaatcggaaccagtgaggtttggagtagacgatgaaaaatcaggctcagtggcaggagggccagggctaacttctgccaagcatcgggcgatgtcaagatggcctctgagggccgcgtgctccttagccgtccagccagaggagtcgaaacgctccacatctgcaccagcggaaaccagcattttggccacactcagagatccgtccacacaggcaatgaagagcggagtccaactatatgtgttttcagctagttctgtgtctgccttctggtcgtcgctaccatccagcagaatttgggcgcactcgtcacggccaaatcgggcggcaacgtgcaatgcagtttctccctgttcatcctggtaattgatatcgacaccagcatccaccagaagctggacaatgtcaatgaagttggccttggtcgctaataccaatactgcactagacttcgagacctgttttcttatgatgctccgcccctgcgagggaccatgctgtttttcggcatccaagagacaccgggtggttttggggtggccacccacaacactcaaatgaagcggggcccagccgtcattgtcctgccagagaggaccgtcgatcccatcgctgacatcgaacatgtcccattctttgagatgctcaatgatcacttcacaaacgaccttgaaaccatactgtgccgcatagtgcaatggagtgcgtccagcaaggtctttggccatcaaagactcacgctgatcagggcgcagcgagtctaagagaaattggaagtgaataacagcagaatcctcgcgacccagctgctggggcatgtgctcctctttgaccacggggcgcggcggttggagggtcggaggtgccgcgggtgtgatatagcgggtagtctccggagggaagttgagcaccattgacgccgcgggctcggcgtcagtcgtaggctggtcacgaccaatggaaatgaccagacggtgaaggcagttacgtctgttgatgtcatcgtcctcttctagggtgtccacccggttcaggagaagattcaggacagcacgagaacgatgaaggatagagcgctggatcagggttctgagaaccctaggataaaccgtgtctcccgcttcatctgcagtggccttcaaagtctcgagtagttcaaggaagacatgagtgtcatccttgcgcagggcatcatccacagcagtgagaatgctcgtaggcagattaagataaggcctagttgggccacgcttcaatgaaagggaagaatgggtggagctcgtgtcatcggatgccttgtcgtccgccttggactggtccgtaatgatggccatccaagcattgatgcgatcctgagactggaagacgcgctcattggaggcgaacggggcgggatcgaccttcgtctccagatagcgcttctgggcctgcgcaccaaccttcttgtccaacttcttggtgatcttgacgaagccacgtcgattgacttcaccataccattgtaagcggcgcaagtggtatcgcaggtccagcagggcctcgcgcaggtcatgccgatcctcgggctcgagagcatggcgaccatccattgagtagccatagcgctcctcgagcaacttcagacggcgggcgaagtcggaatatttcttgttgtagaaatgatcgacatcttcaacatttcggtcgaggttgtagaagaaacctataggcagcaacacaaacggcctggtcagaacagcgctcaaatgttcaagataataaattcaaggaaatgaagcattaaacttaccagccaaatccggctcctgtcccgatttgatctgctcagcagcagacttgatcagcttcttcagggccttgtacttgatgtaagagccgctccactcgggaaccgtgaactgcggcaaattgcggccgaatttcatactggcgagactaaaaagtccactagaaattcagttcagaaccacactcctttcaaatccacgctttatctgcaatttcgagttgtgtttgggctttccaatcgaagaaaattcggagtaagttcaacctgaatatcacgaggaagcgatcaggtgagcgggcgaacgcaggcaatggaagagatgaaccgcgccatcggaatgtgtgtgacagggaatatggagagggaatgtaaaaaggaaggtagaacgacaaagagacaaagctccaaagtgtacctgactgtacaaactgtacctgtctgggagtgtcggggagatgggagggatactttgcacacctagagaaagacgccgaggataaatcgagaggagaagaaccaaagagctcagaagttgagaaaagaaccttggaagagtccaggtgttctttaaagcttaggaaggcgaaccggttggaggtgtgcgcgctggactgaagatgatttgtcgatccacggggaaattctccacggtacggtcttataaatctccgccaagctacatcatatatcaaggtaccgaacactccgtactatatatacacagggacggagtacccatgtatgtattggatttgcggtgtggaatttcgtccgcaagctcacgaatatagtggattacttgtccaacgtcatacgaatgggagagaaaggataccacttgaccccccacatgcatgggatcggcgtcagttagtcattggccgatggaccctagattccctcgtatagaggtgttttgtgactttcgagagagggatcaagcatcatgtatcaacaaatacctggaatgcatataggaatgccgatgagagttcctaaaagcttgaatggctgaaagttcaaaggacccatacagggggagacccgtcacgaggtccgctacagaactacagaagcgccacagcctagttgggaattatctcgatagtcagctgttcaaatcagaggttagggggtaagatcaagccattcataattctatgagtgcaacctattgcactctgtgcgccgaattccatagattggacgcctcccttaggcgtcctaagaaaaaagcagtcgccaaatccgtcgctgtgctcatgatcaggggtcatctcagaaactcattaaaaagcatgaaatataagaggaaaatcgcaaaaactccactggatcagccagcccatcccaaagccacatgcgaatggaaaaaagtgaaaaaggaatctgctcgaaaacggaagacatcgaacggccatggccgctattcaatcagcggcttcaaggcctctaccccagcctgtagcaccgcttggttcttcgtcttcttgagacatgcagtgaggacatcaattcctcctgcggcgcgaacggcagctttagcccgggctccgatatcacctgtcgcaatgcaagtgaggttgcgtatgcagaccacacctcggtgagccaaggcatcgtcatcctcctggcacaatcccaataacagttcaactccccggggtcgatccaggacagctgctatggcggcatcgaactccgtcaacatcgcaagagccccgccggcagcccgtcgcgtcggagcgtcatcggcatcggtcagagccaacagaatgtgaaggcgttgggccgcttgcttggagccatctgcaaacttgataatgccagactcgcaagtcatcagattgcagaccagttcgcaagaagctcgctgaacttgagcattgctagacaaaagaagatcttccaccgcagaccagccttcccgtaccatgagttcgggtgcggagtcgtcatgcgggtacgaagcgagattcgtcaaagctaggagactctcaaatactgggagtagatcacgaggttggtcggccgagaacgaggcagtctcgggcgaagagaggagagagagcaggggacggacggcggatgtgacctggggaaatccagatgctgggaatacatgtgaaggatcaacagagatgaggatccgggccagcgcgtgtgatgcgatgcgtgttgtttcgttcctcacagggccagagctactctgcttcggggctgcaagggcgagtaacagcttcaccgcgccttgctgggccaatgttccacgggacttttggggtcttgtcaaggactgtagaatctttgccgtgagctcattggtggaagggtaggagactcggccgcactcaacgagcagagtcatgatgcctgcatcgataacggcggaacatcgcgacaggacagcttcctcttcatctcgaatatctatcgctggtgccttcacggtagaagggtctgcgtagttcttcaactgtgccatcttcttttgctcttcggataggttgggtaagaatttggtgagattcaaaacgactgtcaagccaccatagagcacggatgagtctttggtgttttgtttcatagccgcaatgaagttacgtaggaaaaccggatcattggcaagttgatccttgacggacggcttcaccgaggtataagccaatccttcgattgcgtgggagctgtgttcaaccttttgttcagacatcagtcccatgaatcgatgaaccagttcagactcgctgtcttgttccaagaccttaccgttgccagccgagggtttatcgggctcggatgcccgaatctttgccagggccactgcggctaattccgagcaattatcacttccattggtcaacatatgtgacaaccattctccaaatttctttgaaacaacctcgcggcacggacgattaatgcaagccgcattgagaagttccaacacgagagcttctaccttcttgcttttggtgtctcgcgatgcgattgggaggaggaagttcatgaattcgtccgacaagaagagattggcagctgcagagggagccacagggaagatggcggccaccgcagagaaagcaacgatgagatcgctgacacggcccttgccaagaatggacatgatcagtgtcaaaagcttcttctcgcctctttccttggcgacatcgagatattttgcagtagccagggtcgcctggcttcggacttctagcggcagccgattgtccagggatgagaggatcacctccaagccttcatcgtcgatcaaatgttctagttcaacggcgtggacagcgagtaaccgagtaattccctttaaagagcggccatcaagatcatggcccgattccatcaacttggcaatgaaaagctggaagagttcactctcgcagtgggatcgtgtttcctccgatgtccacacggtgggatccaacactactgtatcaagacacaccgctgctctatcaccccgatcatatatctcgtcgaagaatgctgtgacagaggtctggagctgtgtagaaaagtacaggcgaacactgacgttctgtcgtaccagcccagagatgatctcatcctgtgtcgtcgacagagattgcgggcgctgtgcgagcaacaacttcaggcattccaaagcgacgttttccggggatttcaggccgtcagtccggagataagtagcagcttctttgcccgcgctttcatcattgtgtaaggtatatcggcggcaaagatcgagaagttggtgaccgtctttgtcttcatgctgaactttcagaaaggcggctttcacttgaggattttcgggggcgatcgcaagagcttctctaagatttcgggaagcagcctattggagctgcatatcagtattccgctagcttccattgagaggtgttcaagaaatagatcacctacctctcggtggcccgcgtcgaccagttcgacagcctctcgggccaggtttacagcgcgctcttcgccctttgcttgaaccattgcaggggtgcgcaagagaaggggccaaaaatgaagattccagttgtcggatcgagctaggagggttaaagtggatgggagggcctttttttttcctgggtgaggggagtgcggagcggagagaaatagcgataaggtgggaaacagacaaccgctttttatggggaaggggggaaaaggaggtcttggaagaagaaaagcgtcgaaatattagaattttatttttgtttcggtttgccgcgctggcctgttcgaattcctaaaatgacaccatagacctttccccgtacatcgatgtactccgtaataatataccgaatcttacagttccgcgcccttttccttcacgaatccccattatcaattggtccgataagacaccaaccacagcgacgaaccccgtcacgttgtcgataagcaaatactcagcttagtccttttcgtcttttggtgtgacctcgcaagtcaacattccaaggtctccgaagagatatcctgtggcctccggtgtgcgggaacccatttttatacaactgccgtgaacagtagaaaggcatcttggaacccagatatgtacatcacaggcactagtttcatcttggcgcattcaagggatatatgccaagagaaaccatatcctttctttcaaatcggctgaaaacagagcatctttcaaccaaagttgctcagacattcaaggtaatttcagtcacccacggcttcgcggtgtgggattcaatccgattggagtgttggttctcccgagatcggtctgcctgtgagtcagtcgaagatcccgcagagtcaatttagtatgaggatgtaaaaggatgcaattcaacgacgtaggttggagatatatattggaaacagatataggacagctatagttgttgttatcaccccgtgaccagcttatcgcttcaagatcctcgacaggtacctagagcttggacttcaaagttaattccggctgtatgtgcagcacagggttctaaataaccagcctggcatcaatctgtgagcccagctcacaataatgaacaccaccttggaccgatcctccatttcaatacaatgaattccgtggatgcttcggagcattatgagttaggagctaccggtccgtattctctacacttacaagaggcgaacaactggctaaccatatcgacatccagacctctccccatccctgctcaccatagtcatcgacacaaacccacacgcctgggccgcactggaagactccctgccactctctaaagcaatcgccaacatcttagtcttcatcaacgcccacctagcatgcaactatgccaacgaagtcgccgtagtcgcatcgcacagtcaaaaagcagcatggctctacccatcccacgatgatccccgaaagcgcaccgccgatcgcgacggcgacgtcgtaatgaacggcgcaagcgacaccccagccccagaaacgaacaaataccgccccttccgcatcgtcgaagaacaagtcacccgcaatctcaaagaactaatggactcgacgactggcgacgatctacgcggcaacatgtccacgatgctagcgggcgcgctcaccctcgccctgagccacaccaaccgacgcacactcgcctgggcggaggagcacggcggcgccaacgccgaagatgcagcggccgatggcaacggcgggggcgggggcacatccacaaaccggtactcagcctcgaacgaggacgagcggctgcagagccgcatcttggttgtttctgtgagcgggtctaccgatgcggcccaccagtatatccctgtcatgaacagcatctttgcctgccagcgcttgagcatccccatcgatgtgtgcaagctcagtggcgatgcggtcttccttcagcaggcgtctgatgctaccaagggagtttatatggctctcgccgagccgcgaggcctgctgcagtatctgatgatggcgtttttgcctgatcagcgctcacgtcgtcatttggttcttccgactcgggtggatgtcgattttcgtgctgcttgcttttgtcatcgccgagtagttgatgttggcttcgtctgctccatttgtctcagtatcttctgcgagccgccccctggtggtgactgcatgacttgtggcacgcatctggatatcggagacaatgccaagcctgctctgttgccacggaaaaagaagaaaaagaagcgtgttaacggggcatccggaacgggaacgcccatgtcgacgcctacgccgggtccttgatatcttttctacgggaggtcatatcgttagagaaaaaaaaagataaccagatggtgacatctggctttatgatgtctgggttggtattactcctggatcacacattcgcttgatgctatgagcaacactacacgtagctggttcacaaggaagagatttgggacaattctcatcatactagtgtgaaacgaataggtacacacggggaggacagccgggaattttgaaacactctgatcacattgttggtgtcctatcttaaagaaggaggctatctagggagagcaagaaatatccgatgaagcaatcgctcgtcttgtcatcctgtcaccgtggaagacatcaatggtgtaaggccaaggaaaacaatggagaatcgggtataccaaggcagagatttcagatgggagagactggactgaggcagatacaggtgattgtgggcgaaagctacctcgtccatcgatgagtaccaacagaccataagtcagcagagcaaagaggcttcgctgcaagatagttgtagttcgcatccagagtgaattgcaattcttattacatatccttgtcagcatccacagcttatatcttcaacctaataatgaaacttacagttatttgcaaacctgattcgacaacctccctgggcaatggttcctcgcgagcctcgcgacatcagacaagaaggtctgttcgaattgctagacatcgaggcaatggcctgaaagatatgtttagcatccagtcctgcaccatggtaataatgaataatgaaagactcacaaaagagtcggtgttgtgggcaaagtagagttcgatgcccgaattgtttttcttcacaacgaccaccccaagggctccaaagaggacgctgttgctcacggcagggtgttctaacagacaagcaaacaaatgttagtgtttggagaattaaagcagcgaaaagaagaaaacggaccgttaaactcccttttcatccatgccctgatagcttcttcctccatcacctgggtaaaaaggccattgtcgcccatcttctgactgtaatacatcctttgcgcacaagtgcttgccgccagtgttgaggcaataagctctccagtcccagatgtaacaactgcacatgtagttccatccacatcagatgggtcttgtggaataacatgggtgccaatgccaattagggctgcaggaccaattcgacctcggtgcttcatgccaatgccaccagaagaagatcccgctgcaatgtttccatacttatcaatggcaatcgcgccaacagtgtctgtaatcgtatcctcgtcttgttcactatcggcggcatcggggctaccatcccgagataagaatgagggggagacaggttgcacaggtagctgtgagttcgcgagcttggcctttttctgacttttatgctccagcgatgctcccgggcgccccttcacatccgcaaaaaagcttggatcggcctggtttctgatttcttcgtctgctgcatggctggtcggatgagctcctgcttgagaagcacgctcgagacgttcaaggcgagtgtcaaggggagtcatgggccggcgaatccagggatcgatcatttcgccacgggtttcattttcataatcattgacttctgcggcccatacctgataacgctctagagcgacgggcgagatcaaggcttcatcgggcatgatcaccatgccatgttcccatgcaaagtccttggcaccttctccaaccaagaagttagggggcacccttgacatgcccagctgtacattagacttatcataaatcttccgagcaagcatgattggattcctgatgtctagcaggctcacgtgttaggcaagactttctgagcaagagacacaacaaacttactgggcacagctccaaccgctccatttagcccatgatgatcgacaattgaggcatcgccttcaacaaccccctttgcgttcaagttgcttccaaaccctgcatttgtaatcgggttatcttcaagcaccattatggctgcttcgacggcgtcaatggcggtgccaccactctttaagaatgccatagccttgagtgcggcgctaattcaattcacttattagactgtgtaaccatcaaataaaagaccgagactgacacttcacaggctttcaaatgcttgtgctcattctcgtggctgtggaagcccgccccagcatgaataaatatggcacaaacgccctcattcccggaggtttgcgacatcttgaaatggtcaacaagtgcaatttagggatcttccacgagattgtgcgcgatcgatcgaggtatcaggtcgaggtcaagagaagcgttgccgattaggcccgaatatccaaggcgataccttgaatcgggtatgtcgagaataccaagtttgccacgacgtcaagctaaagtgaagatatggatgaggcgcgcgaactggcaaaatcttggacgcgtctgcagtgtactcgcagattgttggatcgaaatgcaggtgctctttgtgagatcctcacttcaaattgaaacgactgaccgcctagttccagcctaaagaatcactgggaactaatgctgtaacgatatagtagactttgggcacggggagtgaagcgagagaagacaagagtctacggcgagaccatccgtgtcaaggtaagagaagaatacagataacgaagggcagcactatgcgtgccgtgcatcagaaatgataatcttggagtaataaaagactgaggggcaagagaggcttagggattgatgatgtgcgaatgaatagttagagaatattgcagatttagggaaactctcatagcactggtcgctcttgccattttggtctaatttcactttttgctgaaagtaagcagtacaattgccgtcaccagggcgacatacaatggatggttgtctgctttcttatgtacaaagtaggaaagacctgaggatattttgatacttcccggcacatgatgttgacgtgtgaccgacccccttaggtaatctgacctccgggcactgcatctccccccgccttgtctgcctgtcctcttggtctcttgaagtcagggcattttcggctaccaattgagatccagccgattctctcattattgtctcactctatacatcgcctacacttctttcaacccctcactgtattgtgatcgttcctaggcccaaccacccgccatggcgtcccaaacaccagccgttgtcatggacaagtaagttcacatctgcaagggtcaaagtaatatttcactgcttactctatacattttctagtggaactggctattctaagcttggtatgtttttctatggtggttaaagagctcgcgatcacggattaggctgacatgctacctccaatattccaggtttcgccggtaacgactccccgtcatttgtatttccgactgcaattgcaaccaaggctggtgctggaagcactggtagctctgggggcggccgacccccagtcgcaaacaagccctcgttcctaggcgctggcagtgggagctccaacctgtctgcaaagcgtggcacggaggacctggatttctttattggcgatgaagcgctggctgcgggcaatggtccaggatatgccgttaactacccgatccggcacggacagattgagaactgggaccacatggaacgattctggtcgaactcaatcttcaaatatctgcgcgtggagcccgaggaccactacttcctactcaccgaacctgtaaggcgactttatatgatagcagcgtgctgtgtttaaaattgtgaaacccctgacatttttggattatagcctctgaaccctcccgagaaccgcgagaacaccgccgaaatcatgttcgagtcgttcaactgcgccggtctttacattgctgtacaagcagtgctcgcccttgctgcctcatggacatcctcaaaggtgacggaccgatccctgactggaacggtcattgactcgggtgacggtgttacccacgttatccctgtcgccgagggctacgtcatcggatcctctatcaagagtatcccgattgccggacgagacatcacatatttcgtgcagagcttgttgcgtgaccgtggagagcccgatagcagcttaaagacagcagagaaagtgaaggaggagtactgttacgtcagccccgatattgtcaaggagttcgcacgttatgaccgcgagccagatcgcttcctgaagcacaccgtcactgcgccgaacgggcggagtgtaagtatcgacattggatacgaacgtttcctcgccccggagatcttcttcaaccccgaaatctactcgtccgacttcctcaccccgcttcccaatgttgttgacggcgtcatccagtcctcccccattgacgtccggagaggtctctataagaacattgtgctgtctggtggttctactctgtacaaagactttggccgtcgtctacagcgtgacattcgtcacttggtggatgcacgaatccgtgcctccgaggctcgcagcggtggcgcacggagtggtggtctcgatgttgccgttgtcactcacaagcgccagcgccatggtccctggttcgggggtagtctgctgggccagacgcctgagttccggagctactgccacactaaggcggagtatgacgagattggtcctagcattgtgcggcggtttgcgctgcttggtggcccgggaagctcgtaaggggaaaatgagtgaaccttatcattagatacttgtcaatcgatgtagctcagccttttgttcatagttcgttgtcttatctttcttcggtggtgctgctctctgttttctttttacccaaaacgggttgcgggtgttagcggcattctctacagtgcacaaagccgatttataacgtagagcatataggcagtctgtagcctgaatatcttgaaattttttcaaaaccgaaaatgtattagacagcgtacatatccactagcgccatcatgcttttttggacttccttcccaaacgccacgaggtatgcaatgtcagataaatgtacagcctgaaaaggctcaatattattacttttctggggttttttcactcaaacggcctcagcctgaggaaaagaggtgcggttcaaaatagccacaccctccacgtgaccggtctgagggaagaaatcaaagccacggacgctctcaatctcatagcgaacattctgcttctcatcaccctgaaccataacagcaatgtcacgagcctgggtatggacgttacagctgacatagacaacacgacgcggcttgaaatcaagcatctgacgcaagaagtcttctgaacaacccttgcgaggtgggtcaataaccagcaaggtctgatctggtgggtacggaacttccttgaagagagtggcggcgtcggcagcggcgaagcctgtgttgggaagattgtttgcacgagcattctcgcgtgctgaaacgatagaatcgcctccaatgtcgacaccgagactggacttaaacaaaggggagagggtgattgtgaacaggcctgagccggaatatgcgtccaagaggtacttgattggttttgcgtcttggtcgttgcctgcaggaatggcttgagagcggatgtactctgtgaagccggacaagattgagttgttgttttggaaaaaggcacctgccttgttgctaaagatgtagtcgtcgacgtactcgaaagacgtcgcgttgttgtctgtgatgcaacgcttttcttcaatgtagttttcgcgctcaatgcggatcacatcgcccgtgtctgcgttgggagtagcggcaatcccgccgacattgggagtctctccatcggcggtaggcgcggcgtctttgggaattcgtgcggtagactcccgcatcaggagagtggcacctcgtttataagaacggatgttctccgcaactcgtttcctctcactagtgagtccgcgacgcacaatgtctgtgcccaggggacagtcttcgatgtccatatcgagtcgtcggttcttgtatgtgaatccaattggggggacctgcggttgtgagggttcttcgccatcctgcttagaacctttgcctgcaccaccatgtgcgaaatgaggggtgagttttgttcgatatccaaattgcattggcgaagcaaaggtttctccaatggtaggaataagctccgggatcaacccagagaaattggcataggctttctccacaatgcgccgtttgtgagcaagctggtcctcgtaggacatcatctgaagttggcacccagaacactccccgaagtacttgcatccaatcagcgcatcgtttctttgaggacctggttcgatcactttaacaaaatcggtcaagctgtacgacaatgactcgaaatgtttgaccaatttgacccgtacggtgtctccggggaccgtgaacggaacaacatagacatatttcccattctcggcgagcgctagaccatcacctgttgaggaaagctcagaaatcttgacatcaatctcggtgaacttctctggaagggagaaaggcacgctgtcgccgttggtttcagcctgctcagtttcgttccgtttgaggagttggtttatatcgcaaagcaggacctcatcatgtccactgctcttgttgttcttgtcgaccttcgccttcttgcgcttgccgtcaaagtgtttcttgggaccgttctgcattattgcggggactggcgcattcgttgaacggcgttgacggtataatttggatgctggccgcgcttgaagggctataagggtctgagaagacagagaagaagtgaagcgccgaacagatgaccgtattgcaaacatgtaaggtgaaaagcgacagcacaataatttctagaacgaaaatcatcaaatgagaaatttattagaaacgcatctaacgcgtcgttgattggtcagacactgaccgcccgcaagaaagaacttcattccgacgcttcacctccggctggcctcttttgcctttgcgtcctccaattgcctccgcatttcgcccttttcttcatttttaaagctcttaactggcctaccgctggctggtgagctcacagcaacgccaccatgaacattacacggccggcacgatgccttttatgcagcttcacccgtgctgccgccccaggcacgcgagtccctcgacgccaattccatcctactcccgcgtctctctccaaccggaaacccaagttcccaaatgttaaggctccccgggtggaggaaatcaagccttacacggaagagcagaaggctaagcttgccaaggagtactcggaggcacagatggctgctatcgaagccggcgaagccgctatcgacccgaaggatctggcagaacagatggacgagcgcagtgatcccatggcatttaaatacgtcgacgacttctctgttattgagccaggcattgatcgacaccagcgctccccacagtcgaactcggattacaatttcacgctgaaaaccgaggacgatttcgtgaaggacttcggtcagttctttgccgagatgcctgataacacgacaggtgcagacttcgttcggttcgcagaaaacctgcgcctcacccacggcaaggaggagagcgagctgtctccgcacagcgcacttgttccggatctcttcggacctggagagaccattgatgagccccgcgtggaagagcggaagacagctgccgagaagggtgagaaggagcggtcagcggcggctgaagaaatgacagacgccctcaagagcctgctcctagctacgggctacacggagagccaggtcaagggcctccgcaccaagacccttgtttcacacagcgtcaccaaccagacccgactaggaaaggtccgccgtgcataccgtctttccattgctggtaacggaaatggtttgctaggtatcggtgaggccaagtccgatgaagcctccgatgcaaagatccagtcgcaataccgtgcgatccgaaacatgcagcccattccccgctacgagaaccgaacaatctatggcgatgttaagggcaaggtgggagccacagagttgcagctgatgcaccgtccacccggtatgcctagtttcattccctcggacattttcatttttgctaacaataataggcttcggactccgtgttcaatatctcatctacgagatgtgtcgcgctgccggtattcatgatctctccgcccgagttggtcgctcaagaaaccagatgaacacagtcaaggccgcctaccaggcgttcatgagccagcgtaacccggagcagattgctcacgcactcggcagaaagattgtcgatgtgcgcaaggtgtactacgcagggaagatttagagccgctcatggccttgactagctgcttcgtctcagcgtgtatataatgcttctcttttccttcctcttcttcttgtgtcttttgcatgtacttctataagttggttgttaaacatgacgggtcatcaattctcggtaatcatgagctattcacagcatatctggaaaatcacatatcacaaggttccttagcataacaccatctgattcgcgccagaacaaaaatctagaaacaacaccccgggtataatacgcgagtaaacaaaaaaaaaaaccatcaaatgcaacaggcaattcccatgccttcctttcttattggaacgtcatgtctccctctccctcatatcctccatgctggtactcctggtcctggaaacgtcgatcctcgttttgctgttgttgctgttgctcttcattctcattccagatctgctgctgcaagacaatgctatacacactggccttgagcaaagtgcatacagtcgcagtcttgcgctcaaggagacgaagaccgtcgagaggcatagaggcgggggagccggcgaggtcggcgagtttatcggagagctgcgcgcgaggcatttatcagtaaccagtataaccagtatttgtagttgatatcatttccaatcgaatattgttcatattcatttcctgtgcagagattgtcccagaaagataatcaaggcgaacaaggtcttctccacgtacctggttgacattccgcagcaatcgagcgtattcctccagcacttcctgctccagatctgaaacgagcggattgttacccaagagagggttattcgagtggccccggctgtgcgaggcgtctgcgtcgttcattgattggggtattggaggggtggaggtttccgcggggtcgacctcggcgtacgagtaatcgttgtctgaatcttcgggcgcaaaggcagacattatggaggatggggttggttgctgtttattgaatgttgtagatgttgagctgcgaagtctgcgaaggctgtggtgtcatgtttcgtgttttctggggttccgctgagacgcgttccccaagcttccgctgagatccgaaatctactggggtgggttttatggccttaaacttatttcaacgtcagtcaataggttaatattatgtgttcgaggttatagccatctctgtatagcctcattttcaaaaattcgcccaaacacacatctgatgcctatttcaataacacaggtgtcattaaagacacatggctataaatacatattgaaaccatcaaggaccgtctcattttatactgttgtatattatgaatacttcgtgggcttttcctttttctattaggggtaaaaatatgtcttgactgatagtacacaactctgtctcagttccttggtgctgttcataacctggctgggaggcgcaatcgcgagtcgatttcttttttttacggaaatggcctgtattagaagtttgttttatgggactattgaaagtcccagaaatggagtaactagatacatggacgtaggcagagtctctagattttactacatgtataaggcagcatacttccatttgcattgaacaaattcgtatccgtatggaatactctgtggagaacactcattttgcatacaatatgaatataaatctagctgccttgtcagcgagccaaccatattatcctcattgttggacaaaccgcgtgtccttatttggttgtatccacgaagcactagcgttggtctcccagccgcggcagcctctccgcgcgttctaccaaggcgaataatgtctcagtgaaaattcagctctcgggggaagagattactttgagcaattactacaagccgaccgcaaactactgtaacggccaatcttttagtgcgctatttcatcaccttcccaatcaaagagagagagacccctataattccatgtatatcaatggatgcccagaggtggagagatccactggagggaaaaatcacattcagcaactgtagtcgttgataagtgactagtaactagtaatctagaagcatccaagaagctcatcgaacgattaggttttctttaaacacggttaccgtgttgcatcatagcggtgcgtagtacttcgtacatattttggtggcctgagattgtcgattccagtgtggcactggccgggattgtattggttgtagatatccacatctcaacgacttggctgcaggattccaaggactgaatcagacgaggatgaagtagacgggagtccgtcgcagttcctttttccctatcaacgatgaaaagaggggactgatctttgattggcagagcattcctacaggctaatcgaattagtcggaagaagcttgggaggctaatgtcgcaattcggccctagcgatccattgtcgactaggatgcgaggaatcgacaggggcgaagtactcggctgaattaagttagtttatatttctgcctcaggtgagctttttaattcgatactttcgagatgatttccctatttggtcaacttagtcatggttgactgcgaaaattacagatccttcttagacagggttattatatgtgaatacgaaaacatgggaaaatgtaaagttcgaaataatatgtcttatttctatcacagaaatccccatttagaagtggatattcactatcgcaagcgcctcgtggtgggtgttggtctcctattctgtacggagtactccgtacaatgtagcaccatagacgcttttaggacaggttcccctgaaaaagccaacgccaagatattaatgggtgcggagtagaaggcgatacagtctagaagacatcttgccccgcgaaatacgcaggtcttttaccgcagcgtcgaaggaatacgcctctactttatttaaatgggagcctagtcctatatatatagtgtctgatgtgacatcgtcgcctccagtgaccgagtttaaaatgccgattcgactaatatggccttgtgcgagtttgccgcccctaacaaacggattgactctagtgtaggaaaggagccttggctttgcgctttccacattaacatcttgtccctctagaatcgtcttggccgttacctcatattgtggatcatgacaacacggcccataatggaaaggacacaatgcaagtcaagtggccacttcgcccttacgtggaagaaaaaacgacacggaatacgtaagtgtccttaggtaggaagttgatattagccagtcaccccagatgcggggctcgagcggaaatagaggggcagggctcttttcgtgtcgacagttcacagacgtttcatttctaaacttatgggatctggtccctggatcccaaagaataatagagttgcccaagagatgttttcctagggttcggggtagacacgtgtcaaggttttttgccaaatacggttagagggatttctactcttagccaaccttggaaggttcggtagccaagatagccaaggtaggttagccagatttatatctcattgcgaatacgaatggccactttcgaataccattgtctttaagtttctcaggggaaaaacccatcggattcattattagggggaatggagaatgttctctgtggattcctagtgctatagtgtatgtaatatttagaaatgttccatatgtagtggagtcgagcctttacatgggatagggggatctaaagatctaacgtttcaatttccgacaggggcatctcaaggtttaagcttgttttagctcggcttgtcaaacgggacatacaaagtatggtatagttgacgagatacgcgtatggaccatatttcatcttcgccacagtgcccactgccctgtcacactgcttcatccaattgtgacacgttactcaccccgacctccgctgtccattccccatggagttctcccgtgcccacatctcggttggacagcccaatttacactgccccctttgtctctgtctcctgggtcgagaggaacgggacgtcttagcgctacggcgctatgcaagtctaggtaacccaatagattaatgcattcatcgcgcgaataaaaaagcaaaatgatatgtccccgagattgatttattataatcgtcttcacgccacatccttcttccatgtacaaccttctgacctaaacaactatcggtcatatctcatcggattcttatcaaatgagtgagatgtccacctcagctcgggctagggacaatgtcttctcaagacgtgagatcgagggcatgcttgctgaaggaaagttgattatcattgtcgacggcaatgttctccgactagattcctggattaaatatcaccctggaggtgatatggctatcaaacatatgattggcaaagatgccacggacgaagtgaatgcgtgagtctctctaacacctctctattcttgtccaattcaatttgcgcattattctaatagccttcttaaagtctccattcacaggaagcccgtcagcgcatgagcaaattccaaatcggccgaatcgagggccgctggaccaacttcttgcctcccatccaaggtggcgagttccgcccattaaccgaaaatgagatcgacgaagaagacctgactctctcagagctatcaagcgaagagagttcagcaccaccatctcctatcttcgaagccgaagacgaaaaattgggcctaagacgcaggctctcagtatcaacaatctcctctgcaatcagcgctgtctctccgtcagaagaaaccaaaccacgagcctacgtgatcgatgctcgaactcaagaggagattgagctggatgcatctaaatacccgcctcttgacgcagaacaccaagaatatatcacaatgagataccgcgagttgcaccagcgtatccgcgcagcagggctgtacaactgtaactacacagcctacgctatcgagatctctcgctacaccctcttctttgggctgtttgtatttttcctcaaacattcctggtactgcctgtctgccttcttcctcggctgtttctggcaccaacttgtcttctccgctcatgatgccggccacatgggcatcacgcataactatcagattgataccaccatcggcatgattatcgccgattacctaggcggcctaagcttaggctggtggaagcgcagccacaacgtccaccacatcgtaaccaacgctcccgagcacgatcccgatattgaactgatgcctttcttcgcgctatcgcaccgcttcttcagctcgctccgcagcacctactacgaccgcatcatggaatacgatgcagtggccagggtcaccgtcaaataccagcactatctgtactaccccatccttctcttcggccgtttcaacctctacttcctcagctgggagcacatcatcgtcggccgcgggccgaaacacggcgcaggctggtggcaccgctggtttgagttcgccggccacatcttcttctggatttggttcgggtatggcgttgtctggtgtagcattccgacttggttcaaccgcgtcgtgttcgttctgatctcgcatatggtgacttcgccgctgcatgtacagattacgctgtcgcactacgccatgtccactgctgatcttggcccgctggaatctttcccccagaagatgctccgtactactatggacgtcgactgcccaccttggttggactttttccatggcggtctccagttccaggccattcaccatttgtatcctcgtatcccgcgacacaatcttcgcaagacgcagcagttcgttcgggaattctgtgaagatgtgaacattccgtatgcggtctttaccttctatgatggcaataaggaggttatcggtcgtctcgctcacgtggccagacaggcaaaactcctggaagagtgccggaaggcttatgcggcagatccccatttgcattgaagatgttcgctctaatagagttgagcttttgagatacccattatgtagtttgtattgttttgcaaattgaaatcgcttggaattgtgatacacccttttttctcctatcaatatttctgctttgaattctcgctttattgtgatctatcttatggagacttgatttccgtctgtcagtattatacctgtgtttgacattgctggccatctacatggtgtaaatgataggcgcacctacttggcagagacaatttaatgacataagaggatcattaagtatattgaaacaaaagccaaatgatgaaatcgcttcgagtttcgtatacatagcttgacagcagaggttatcttgaaaacgtaaatttgagattgaaaacagcacggttaacccgaaaaagcaaatccgtaacgccgtccgctgcgaaataggatgaaagagcaaatatataaaacagttttcaggaagacgcgcaaagaaaacaataccaacagctcagagatcgtgacacaaaccatgaagtcagcgaacggttcgtgtcgatgctatgttgtgcctgaattgaaggcaaccaagagtaatccaaggctctaggatgtgaagaaaaatgcaatatgcaaagcaactggcaagcaataaggcataatgacaatgtgatgaaaggaaaaaaaggggagaaaaaaaagcttgaatagatccaccaagaaaaagtcccgaaacactccatacacccagcaaggattgcaatggaagaagaatagcagcatctaaatacagtcgttaatgcatcatggtcgtctgcgagccgacacacatacggctgtttccctcgtgtatcggataaaagaaaacaagtgataagacgtgaagagcacaggctttacatatcaccctcgtggtgaagggtgacactgttgaactcctcgaagggatcgttgagttcgccgttcggagttgcgaggcctgaatccattgggacgcccttcatcctggtagaatcggtgccgccaatatctacgctagcgctctccttgacattacggaaattcaccgtatccgtgccggcacgaccctggtgcggaatcataggcggcttcatgtgacgaataagggcccattgggtctgtcggaagaagggatgagccttgacatcagaggcaccagcgcgagctcctaggcgcttagtctcatccttgatcagcagtttgcggatcagagacttgcacatggtcgatgtcggctgcgcacccgagtgctctggaaagttcacctcgtcccgcagaatgctagcaaacgtcgcgtttcgattcttgcccttgaatggagtagtgccgtacaacatttcataaatcagaatgcccagggtccaccaatcaacggcgctggtgtgaccgcaacccttgatcacctcaggtgcaatatactcttccgtcccgacaaaagaatttgtgcggaaatcggcaatacatgacttggtatcaatcgtaggcaagccggtattggagtttccaccactgcgtgcaggaatcatcgtcggggcacccccaggtccagattgctttgacagatcgaaatcagaaagcatgatatgaccagactggtgaagaaggatattttccggttttaagtcacggtagatgaaacccatgagatggagatattccagcgcagcaataacctctgcggcgtaaaagcgagctgcatcctcggaaatacttttgccggggcgggtttgcagggctaaaaatggacaagtcagcaagggaatcaagaagatgatgatgtcgaagatgggataaaaaggtgaacacactcctgaagaactcgccgccactacagtactccatacagagatacaaataatcctctgattgaaaagagtgatatagggtgacaatgaacgggtggttgctcgtagccagaatctcttgttcggccaaagctcgtttaatcttgttccgtttgatcatctccttcttgctcaaaactagccgcaagtcagtaaatggcatcagacagtcaccggtatacaagagaaaaaagtacctttcatggcataaagacggcccgatttcttctcgcgcaccaggtaaactttgccaacatcacccttgccgatcaatttgatcttgtcaaagctagcagggccgacttctacatttcgaactttgatggagtttgaactataggtgcggcggaaagcagcgttactgttgtaatctgagctgactgaaggtatcgccagattggaatggtcgctgcctggatctgcaaagcccattgacccgcccgacttttccaccaggggctccttgccgagttgtgctgtttgaggacggccaccctgaccacttgtaaataggccttgggcattcggggcagaagccacacgtcgtaacttgcgcgctagttcctctttgtttgcagtggtcgcctgttctactgccgagacccccgtgacttgcaactcaggggtatcaggaggagaggacggaactgacccatcgttgcggtgtcgcaatgctggctgaccctggtgggcaaagtatgggttggcggacgcggtaggcgacatcgcatcatccagtggattaccttcactagccacggttgttgatcgattgcggcctatgcctggcaggaatcgagactgccggaaagcagacttctcgttcttggccgccccatgattatcccgttcgcgttcgcgttcggaacttccagaggggttgggatggggagaggagtggctacttgaactgttgatacggaaaaagttcttaatcctcgtaggcaaatgactagactcgttggagtgttttcgtgtgggaatggagagagcggggaaattcccgcgcttctcattatttgtcaccgccggcggactggaggcaaagagctgcgtcatattgggtgggtcgccgaaatcaaaatcgagaccgagatgacagtcacctaggacctaatccgaagggtggaaaagcaaggtgtgaggcggacgaaagggcggtaatcttcaagatgccaagtgccggctgggatataatcgcgcgcgggggtcaattgttagtaagaagcggtacaaccgggggtgtccacccaaagaactgaaaaggaaaaagccgcgataactgggctcatgaataagacaacatgtcagaacaaataaagaatgaagatcaagaattgagaagccagtgggaaaagagggaggcaaggaggaattggagtggagaaggacccgtggacgcggaggccaaggcttagtcatctaaaatcaattcaccagcagtgtacgtacaacgtctatctacgccagaaatgttgagaatagtcgagaaagaatgataggattactatgaaagatcaatttgaaaaaaaagcatcccaatatgacttcagcttagtccaaggggtcctgaataacccaaggaattagtactaaggaactgggtggcgacatgtcgagtataaataactacatgtatctacaatgtacatcacgtgatagttatacacttcattcctccggaagaatatcaatacataataatattgtacagattcatgtttcgatcccttcaaaatcgtttcctcccttgactcaaacttggtccatgtttcccaccctttttttttgcttttttctgccttttctgccttcatctgaaacacttcggagacttcgggacacatacataggcctgggctcaaatccgcaacgcccaacaccacggttgcttggtatcagttttgagcatgcacattgattctgctggtgtttacaatagcgggtgcggtgtgtctgacactggcattgatcaactgcgaggaatacccagacaggtaattggtgttttgctggctgtctggtgtctcgaaaccgagaacaagtgctgtgggtacttcgtctctcaaatctccgatcaatctcgatggattcatgagcgactgaccggcgttctggacattttcacgtgcatcatgccgtcgacgggcatccagactcgatgagatcatacgagacccaacgctgctgagaccacctgcaggtacatagtgcttacggcgaacactcgacctcgaaatcgccctgctcggcctacactgggacaataggctatccctgccgaatgtgttattccgagacaataggggtgcatccgacatgtcgtcggggtaatcccctccaaagctgttcattgtccgagtgaagctcccactgcggctattatttgttaaacccggctctttgcacaagcaagtgagtttggataggcttacctgtggttcatgccatgctccgattgttcggcgaagggtcctctccgttcaccgggtccttccacgtcaacgacaaacatatcgaaaaattccgtcggaatgagagacgattggtggtcaaacagctcagtacttctgtgcggccgatcaaaggaaacttctgagaggttgtcttcattcaacccctgtcctaggctagaatgtcttcttgtctgttgttcgtcatctgaaccgcccgaaattgatgcaccgcgggcctcattatggagatgctgaagcccaatcaaagttgcatcttcattgctgcagctctaggaattagtattatccaactgctagtcttgggcaaagaacttacatggtagtcgcgaggcttggtgaatgactcctatcatttccagccatgttggttagttcggcgacgtgctcctcgtggtcaatttcagtaatcgaatgcaatgccgatctgaaattggagacgtttcgaccgaagttccgaggcaaagtattgctgatacgacttctgtttccgggacgacgttctgtccatgtctcctgggggatccatgatatgattccgttgtgttccatctcagaacccatttcaggagaaagttgaatttccacgcggctgttggcgtcaaaggacgggtcattgtattttgtaggcacgttgccgcctgtcccattcgcatcatgaaacaactctgatcttctatcgacctgaatctgattgaagaatgagtcgcttctgtttctattgcggtcttcatttacatcatcatgaatccacaaatctgagcttccatcaacctgcacgttaccaaggtctgagttgttcccatttgtgtggcttgttccattgcagtttttgtctgctgctgttaagtgtttcctctggatttgtatgggatggccagtgtttgggtcaataatatcaaccccacgatttatgttggcacgctcaacctcattggtaccatcagtcgactggttatcatatgaaccaccattgatcgctcctccggtttgcacggtaataccttccggaccattggagttgttcacgctagccgcccctggatagcccatgagcatatcccattgatcaagagcgctgagaactcttgcccgttcgctgatgttgtaaacgcgcaaattataacaatcatcgctgggtggaatctgtggatttaacgcgatcacttcgttaacctcctccagaaatctttcatggttttggactttttccatcaatcgtgactttgcctcaatcatggtatcaagaccgaacgcgtatgccactcttacaaatccaacataaaagtcgcaatcaggcaaaacagcaaacggcgggcacatgtttaacatcatacgcacaattgcagcatcatcaaggttgataagactcatgatcagaccccatcgtgtctggcgctcctcagccagacgggcaggctcatggcgcactgtgcttggattacggcgaacgaactcgatttcgtctactcgctcaatccattcagcatatggattgtctgattccattaactgggaaacggtcaaatcccgtgaaccgacaggagctgcgaactgggatgtgctttccagaaaaggcgacggcaacccctcgtgtaagttaatatcggacgctgtggaagaatggatgattgtaaagctctcttgtgttgcttggttctgagtcccaggctgaccatcaacaaagacaacaaattcgtcgtcattcattgaggtcattgacatgggcgacgagccaccaaaacggggtgatggccttgatggctccattggaacgattcttcccccagccgtgacccgctggtgtttcggggaagtgtgcttcttcaggaattgagcaaaccctgcgtcattcgtggggaacacaggctcaaaggactttttgcttgtgcgagtcgggcgattcttgggtgctttcgatgctagagttttgttcggtcggaataacctggctgactctttagtcgggcgatttctcgggttttctgaaaggataggcttcttgcttcgatcaagacgcgctcgtctgcctgtggcgatggtcagcaagttttctttcattgggttatacagactcgatagccctgagacccacgacaggtcagcttggtgtactggaacccagttcgcaccagtgatccaatcgaatgtttgtctctttagggaagatcattgatcaaaagcatcgtcacaaagggaaactcacagtattttgcttcactggtccacttgcagtgtacacctgtgtcctggcacaatgccaatagtgttggcaagttatacttcattttgttcatggggatgaaatatttacctgtaagaataacagaaacgaaagacttcgataaaaaaaaaggaattgttgaggggatccaggtggaaggtacagggtcaatgaagaaggaacgagggctcgaggctattcagaacagatagagaccagagtcacgaggtctatactcgacgcgtccagcacgcgtcgatattggccagtagccctaaacaggaaggaaggacacttgaggaaggcagagagagaagacaacaaattcgaaaacgaaagaactcctgtccaaaaatacggttacaacataacagcctatacactctcccggattttcacaggttgaaggccactgtgtacaccccaatactccccattttcctcagaaggtgacatcacttccatgccatcgggttcaatattcccaatctctttttttccctgcctcatctcccagcttccggtacgttcatgtccctgtacagccactccaactccagcggcgagaccactggatgcttgcgtactatcagtcttggagtttccccatatgggttcactgaacgacaaatcggtatcactggcaagtttactaggacctttgaaccctcccaagcttcctttcttggggtatcttcccttgcgagcacgacatatgaggaacacaatgactgctgtaagtccaatgacagcgagcgttgtaacagcaccaatgactccggctacagcgggagccaaacctctattcttcttcggctgagatacggtctggtctaacactccattgcagaacacagtttcagcgttgcagcgtaggcaccattcttcggttgatgccagcgcaaatgtctccagctcggaatgaaactcagtatatgggattgacgcacgactagggccgtgtccaaagagggaatacatttcgaagtcggtggtgttgtcggtcccattgtgaagcaagaatctcacgtacaaattgtccatcccagggtatgttgggtacaagttgctgctgttctcgtagctgtacagctcgaaaacaaatgagccacctcgtaccaagcgggagaaaaagttgggttgatgctggtttgcgagtcccaacagagacgacagggcaacagctggctcatcaccgccgaacaacagagtcatcttctgccgggtgccacttgcctggatgttcagatcgaaggcttctagaatgctcgatgccaatgtctgcccggcaattgggctagctactctgatcgcagacccgctggaagatgattgttggctgttggtgctccatgcgtactggtccgccagcgagcgagcacggatgatgtcggcgtggttcagactttccaacaagctgtcattatgcacaacttcataatccaaatattccgagattgcaacggcatttgtgtaagttgcagaagtatcatcgtaggctccagacaatgccagtttccatagttttctataaaaggcgtctgtgtctcgtgtgatatcctgggcttcgttactcccacggtattcgccttcggcggcattatacatgtcacacatcgcgtgaccttcaatcaaaatagactgagggtcggcattaccgactgtaacaatccgagggtattggtatccgttcaatggcgcctgtgtaaacgatccgttcgcaatttggctgctcggtatgttcattgagcccaatggtgggtatagaccctgcatgaaggcttgggcggaaccaacaatgttctgatccgttgccgagagcacaaccacatcgtttgagtccaaaattattggggatatgttctggattatagtattagagcctccagacacataacgataacggaaatccgatgctgccgtggcgagttcgttggctccgtagtcggtcaatgttcgagagctggtgagctcactgggcttgctgtctccgtagacggtaaatgcaaagactccccatactttctggatggattgggagtcttgggcagagaccattaccgggccctgaagggccaggagagtgatgaataggctgtacatcaacatggtctttcaagcatcaaagaacagcaggccttgactggatggatggattgattgactagctctataaactacgggggcaacctctttgtagtaaagaaactcggacctccatggtccaggcctcgaatggtatggtagtgttagggttacgaggataccagggaaccagacggtgagatatccgctttcaggagccggtagtactgctagtagacataccggctttctattcgcgaatatcaaaactcaaggcactccaagctttcgggttcttcggatggtgaggagcagctgaatcttgacgacactattaaccttgcatgtagattcattacgaagtgtcaatcaaaaaggatacttgaggagtcactgggagctagaagtgtctagtcgatgtcaataataaaccacacaaaccacacaaaccacacactatatatattgaacagtaggataacttcattcgatttataaattcagaaagtaccatgaccgaatctgaattttgtgtggatgttcatcacagctcattttttcatacgattggtaggctcaaggttgcacacaacttatacaggtggcataggattgatgacgcgcacaaattatccgcaaagagagagtcgatgggacttttatatacaccagtctacatagatacctgggtcataatttactaattgtagataatagtatacagaacgatagaatgctgtttacggaacaaaattccgtctaaagattataagtagcgtacatgtaggcatcactagtgagcaaatcgccaaatgtatacatagcacgctagtcttaaaacggaactagccccctgtgaggtacctgccgacctacaatatacggagtacatgtacataccatatgtctctctggatattgtcatgatatctgcatattttggtagtattttctcttatgcaagccagtttgagccaagaagattggtaaatctggcccaccctcagcggcctcggagattatctagctgtaggaactcaagatcacagagatatagataaagttcctagagacgatagcagatctctatgtactcgatggaacaattgattgcctcattctcctagagaagatatttatcacctttttcccggactgtctttcttctaaaacctgggcagaataccgaaaaatcttcagcgagagtcactgggctatcgtagatctgataattgatattattgaataagagacgggtttcatgccaggcatataaggtagaacaagttgatgatcgttcgagagacctaaaattaatacgaatgatgtaccttttgcatggtgaacacacgaaaaaggtacttatgaattgacgagataaacatacgcacatttatacactcaaccacgcaacttccgccaaggtttccttctcccctctccccattaccttccttccacgaacctccacgcatacatttttttgatgtccacgcttccacccatcacctccgaaatttctaccgcccggcagaaaaatcatattttgctcctccatccttcttccgcaagccctacaaatgcgccctacccctaagccctcatttctgctctcggaagttgataccccgacaggcgcttattccaaatggtcgagactcgaggcgcgcggccatcattcgatggccaggaaacatccgactttcctcccttcccctctgatggaggtgacattggtaagtgttctcttcaagcgcctcatccgatcgtcccgttcaccagcctcgaccaccccacccatacctatcaccctcatcgccaatgggacctcaatataactctagaatcaatactcaccttttaaatctgtatcacagaccaaaaagtgtctcattccctcgacgatgaggagcatggatcgcctccggcggccaagaagcgccgtacaggcgatagctccaacggtgatatttctctgcccgacggagtcaccttgatggccgatcagcatggccctggtcacaaaattgaagaagaattggcctcggctctcggcgaaggtgttattgatacagttgagcagaacgttctcgatgtgaaccaaactcttcagcatagcactcacaacacccatgattcctctacagaggtcgccactacccaggacggcaactctgatctcaatcacgacgtggctacaatcatctctgaaatcatggatcacacagagcgtcaggagcaaaccgttgcaatgggacctcaagaactaccaccgtcgaatgatttcccaggagccagaggttttgctttcctcaaggccaactctcacctcaagattcagagtctccctatcctggataatcttgtgagttgaattgatactatttacacaatctcggcttcctaacatctggccaatcatctcctagtcgacgcaaatcttgtcattcctttccaaaaacacctatcaagaccttactgctatggtttccgaacctgactccgaaaatggccaggcatatgccaccatgcgctccttatttgaccatacaaagcgagtctacaccgtcaagcactcattccttcagcctacggaccttgaaatcacagacccttctcaaattgatgtcattcgcaaagcgaacctggcgtcctttgtctcgagtatctttggatctcaggaaattgggtttgcggacctcaatgatcatttcttagacgtgtttgtccccgagggcggtcgtttactgaaggtccaaggtgctctatacctcgaactcaagacacaggctttcatcgcagccatgcataacaaatctctcacccgtacacagctcctctacaatctgttcccggacgacatggaacaacggttgttggcgagacgtcctggtaccaggcagctggcaccatctgagacagatttcgtgaatcgtctcacctctcgccgtgacatccttctcaatgagatcaacaatgaggaagcgctgaatgccctgccggataagtatcactgggaagatttcctccgagatctcagctcctacatttcgaagaactttgacgccatcaatacccaacaggttcgtttgttgctctttatcttcctcaaagattatttttatgctaagatcatctagggaaagaaagccgtcaagggacgtcagccctcgagttcaaatggcgatgctcacgaatcgcccaacaccacccaccagggtcaattcgcactcaaccaacaagttgaagtcccggtggaccgaaacatgcatggcgaccttgtcgcacgtgctgcccgagcagcgcagattgctctacagggccatggtctccgacgctctcagcagcagtcgcaacaacagcatcagcagcaaccccaacagacccagtctcaggctagtccgtcgcctctaccgcaacaaccgcaacaaccccagcaccaacagccgccaccacagcagccgcagcaacagacgatccaacctgataatcaatatctccatggctacactgctgcacaacaatcgcagccagttcaccaacaatatcatcatagtccgaccccccctggaagttatcaaacacagcaggcctcccccttgactttccagcagagcccgttacaggccaccttccagcaatacaaccccaatgcagcgcaagctatgcaagctagagcaaatggcatgtcctccaaccatggatacatgccggggattccccattactctcagtcacagcccactcaggttctctacgagcgtgcccgaatggccgcatctgcaaaatcttctccgactagccgtaaatctggccttcccagtcagcgtcgaccctggaccactgaagaagagaacgcgttgatggccggcctagaccgtgtgaaggggccccactggagtcagattcttgctatgtttggacctggtggaacgataagtgaagcactcaaagatcgtaaccaggtacagctgaaggacaaggctcgcaacttgaaactcttcttcttgaagagtggaattgaggtcccatactacctgaagttcgtcaccggtgaattgaaaacccgcgctcctgcccaggcagccaaacgggaagcccgtgaaagacagaagaagcagggcgaagaagacaaggcccatgtggaaggaattaagggtatgatggcccttgctggagctcatggggcacccgtgtcgggacacgatatgtccgcctcacctagccttccaccggatgctaacagccagtccgtatttgatcaaaccgcggaacagaacctcatgcagactttgagccaggaggtacacggaagtcagtaccctcagcagcatgctcagccaactcctgatcacatcgatcctcatatgcagttgggacagtagaggattgtcatatccaaccatttgtcttattgatttagctttttatccgcaagattcatcatgtgaacttcggatttgcaatttcgtttcggagtctagggctggattgtgatatttgttccttcgggaaccacatttgttttactatgggattgcgacattgcgccggactgggcgattgcttttattgcatcccaattgtatgagtacatagtgatacatttcaaataaatgataatgaataaaataaacacactctttagatgtagatagctttagattacaatatatatgcgttgatacatagcgtggtagtcgaggtaggtcatcagatggcccgtgcaccacccgtgtgactttgaatctccctataaacgaacgtataaccgccgcagccattgattggccttgtacttggaactctgcagcccagtctcaattaaaggatacttgcagggtttcccgccgatatttgcccaacatggccgactctcaaacatcgcaaccttcccaacccataccccagaacggatcacaagagcatccccctccgaccgaatcggaagataacatcaaaactgagcctgatcttgatgtttccatcgaaaaagacgtcgatatgaacaccgagaatcagaccgaagcgaacgcgaacaccaccgcgcctggccaagatcccatggcccccgcgccagaaccctccaagaaggaaacaagcttgcgcgagttcctcggcaagatggatgactatgcaccaattgtaagtcatctctaaaacaagactgtaacctctctgagcttcccctgatcgcctggtcacacggtggaccacggcatccccgccaccatcgattgatcccaagatttcgcgcaagcgcatcgaaagcgagacccatgatataaaacaaaagacccatcggacaatcaaggaaaagcaaaaaaaaactgaccttcgatctccagattcccgacgcagtcactgctcactacctcaccctcgccggtctcccaccaccaggcactggccccggccaaaccccacctcacctggcgcgactcctagcgcttgccgcacaaaagtttgtctcagacatcgcagcagattcgtaccagtttgcccgaatccgcgcctcaaacagctcctccgcaaacaaccccatcggcagtctagcagctgcggctggtctcggtgctccggctggcgcaggtggtgccccagctcctggcggcgatggtggtaagggtaataaagcaggcacccatctcggtatccagcggcctggatttggaggtggtggctcgggtggctctggtcagggacgtacggtgttgaccatggaagacctgggaatggcagtctcagaatatggagtcagcgtgaagcgaggcgagttctacaggtagtacattgatggaaactgctcttcggggttttgcatcatttgtcttttgcattttcgggcttatggcgtttaggtgtgcaaatggtcctgcgtggcctgggatcatgactgcattgctagtctgggctggtgtctgggcggatccaatggatggcgttttctcttttttcttaactaacttttacttactagaatctgtgcctgcaatgctataggaactagttaagtaatgatatgaacatttctcatgtgttgctagcttcgaattatgcatcagaatctataagaacaccgcagattgaataaggactattactcgttatttgccttcctatacaggttctatttgggtattgcactttattcgcagtttgaatctaggaaaaagaaaattttatattgaactccgacccaaaagcagctaatgtcacaatgaatccaacgatatatctgtacatagtgtcgcaaaataaagagatgtaatgtagctctcctagtacaaagaagtatctgcactaggatgatcatgcgagtcgtttatttgttcttagactgcttgtatgtgaagcgcttgcgggtcctgtagagcagattgaatgtcagtaaataaccgcatcattctgagcctgctcatcatgcttgtgctgaacagacgtagaaatatgtatacatacgcaacatattctccaagcttccgtccgaccatctcctctgtcacctggatctcgacgtatgtcttgccattgtgtacagcaaagcgcagaccgacaaagttcgggaggatggttgctgcgcgtttcgtggtgcggatcgggggggtgttgggtggaggggggagggtgcgtgggagaggaagactgttttggataatccagtcagctttcaattccagtatgagatgttcccgttgtaaaggttttgtaggttcgaagggaggagtttgatttctgtcacgtacgggacgatgtttgggcctgttggaagtattagcgtgtggcctcttaggaattgatcctgaaatagagatcttctagatccgacaagactcacctttccagaccgaccggccgaaaagggcgcgtgtggggaacattttgacttgagggtttccgcagttgcgattccgcgatgttgaagatcaatgtcgaagtctcggcgggattatgtcagcacttttatagaggtcgtgggcctggcgcgctgaaagaatgaatgcaataaattggctgagtgataaacgaagatgtgatctacatagcgaattggactgaaataaaatataataaaagttgctagtagtgcatccaacggccgccagcaactgtgggcacatgcgattctatactccatctcactctgccagttcctcaaacatcttaacgaggctgcgcacacccatgagtagattctcatccgggccttgtccaggggtccagctggcatgtgcaaaatcaatcaggcggagggcgtggactttaggagtttcgtcctcctcgtcatcgtccacgtcgggcatctgcatggtttcggggtcaatgctgatattgatagcctgttgaggcatcccatcaccaagctggacattaaccatctggaaagcttcttcgggaagttcaaattcctcgtcatcttcatcatcatcttcttcttcctgagaacgggttgctggggctttctgttcctcttcaattgcctgctccatcgcttctatatctccttcgtagaccaccaatacactcgcagagtacatccggctctcttttgattcaagaacacgctgcaagtttttcaattcttccgtcaagcgctgggcgaccatttttgatcggtctatcttgcccgcctttgcgccagcaagaaaggtttcaaagccttgcttgacattatccttactgaaggagcgaccgtaccacttgtcataccgccgatagccatccttctcgatgacttcgcctctttcgccctctgcaccctcgtatttcgtagcatacgggtttgtccgatcgccctcatcggtctccccattgtggccagtccagactttcatgcccgcgatgcgatatccaacgctagaactggtggtttccttcgatacggtatcaagtttcttccgcttctcgagcggcgcatcgtccgcccataaacgcgcgccgagcttaacgtccagcacgtttggccgacggaacccacaggcgatgttctccagcacgatcgacaaaccagtatcgatttccttgcctccagagggcacccatactgattcctccttagcaggggcagcgccgtctttgtgcgtggcggttgtgtgggatggcggttggctaggctgggagaaatcggccgttacgtcgccgggctcggagaggggaaggatgccagattctcgggcggcagcaatcgccagcggttgctgttgttcggaagatgagagggatccgacgtagagaggcatgaactcctgtaattccgggtggagcgcgctggattcgtagaattctacctcttgccgcgtgcacggtttcgcgatcagggcgccagaggccgtacagcgaacgccgtcactggatagaaatatattgttagcatggacataaatcaaatatcgtactcgagtccgccagtgttggttttctttcgcacacccggctgggttaattcgtgtgggacgtcgcgtcagggcacagagcggcggtgtggaacttactgtccggcagcagcatggtcaaaagggatcagatcctcgctgcccagctgtggtgtctttcgattttctgatttcgaaggcattttgatacaatcactcggctcttatgacatgaggaggtctgtattccggatgccccaaacagctggagtagtcctgaggtgtagagattcacaggtatctttaagcctggcaaatagaatgcaaataaggtgaattgtttaaacgtatgctaaatgctaatatatgagaaagaagtgagatctggagaaatgacatcccaaacgcgggataaggggggtgggggcgatgtcactctcaaccctaatcttagatgaactatacgatctgtgtatacaacattgaactcactaacttatccattcataattgtaattcttggatttttcctttatttattttctcctttcaaactcaacaaattgtaaatcatcttataatagtgaaagaaacataaggttgtttgggtgtttggttgtttgcctgatctcatctatggatgaggtttataacgactaatcctcacaactaaacatcacgactaaacatcacgactaagcaatcagagccttgctattaagtcttgtctctttgttttgatctttccttctccttccaatatttatccttgcttctcgcaacacggaaacttcatcctttcaacctcgttacttctatcattcatcatggatgaaaggcccgagcctacccgtgaagacaatttgtctccccctgttcagtcgcttaatcctagcttctctgatgagcctatgaagcctactaaagtcatgactggagacggtgcccctgctaaccttgaccccaccatgccggaccaagagcatagcgaagccaccgaggaaggatccttcatctcttccgcggaatctgtctctgaattgcctcaattatctgctaagcaggctcgggttcatttcattgaaccagtcattccggagctcgagaagtcagaggatgcactcaagactgagcatgatgtgagtgtcccgattctatctgcccaggatccaatctcctttgtatcataataaatattatgctgacactactctataggttgaggagcctttggcttgttcggatcaggagcctaacaagcatgtttgtgatgaagctgaccttggaagtgctttacctcgtgtttccatcgctacggaagagccagagaatactacggacaactcggatatgaaggatggtgcgaactcggagaaagaacctaagattggattcaggcatgatcccgacgaggaaagggttctcgcaaacatggaacttgacgatgatgcttcttcgaaatcaaagaagaagaaaaagaacaagagacgccccaagagccagagaggagaggtaagactgtgatactgatgtttaaacaaccggattctgtctaacagcctttaatagaacgcgcccacgggattcgaacccttctatgccgatgcaccaattactccgaaggagttcgaggagaacaagaacatctatgatccgtaagtacaattctaacttccaaactgagacattgtctaacacttcatgacagtgctttgcccattcttgagtaagatccccagatattatcgcataacagccactaatatgacctatctagtcgaattgacgaggcgatcaagcgcttcttgtacaaacgacgccttgagccctacagacgcaaggttttcctcaagtacctacagtacggcggtgtcagcgtgggccccaaccattcgcagggagtgactccttcggaattgaaggagatgtctaaagaagaggccatgcaagctcgctgccacacggccaccattcctaagatgggaaaaccatacccaatctctttcaatgacgttgccactggctacctgtgagtcttataatatttgaacgcttattcgagtcatgcatgctaacttagttgatagaactgggtactacatgggctactacaatcctgatactgaggaggagatcaaagtctgcactgacaccatgaagaacttcttttcctacctgctctaccacaatgtttgccccgagcagaacgaggaccttgaggaagctcgaaagacatgtgatcggtccgccaaagagctgtggatgaaccagcaactcgtacaccatcaaggccccggagacttcaaccgcggttgctccttgctgtttggtggttactacttcgaggatgtcgttgaccccgaggtttggtccaacattcgatatgctgaccagaaggtcttcaccgctgaaatcgctcgcaaggtcgtcaaatatggcattgcaattgccgggaatgatcggactgctcgcaaattcaagatgattgctgacaaggacatgatcgaagccaagcagattccggacatcgatggctttgaggtcatctccgtggaggaacctagtgaggaagtcatggcatactacagggagctaggccccgatctgatgccagtgggcaaggttcgaagcaaggaattccgtgatcctgctagaggtcccttcgacctcactccctgggaaaagatcgactgggatgctggttttgccccaacttacgagttcgaatttctcgtcgaagctcctctacttgtccatatcttgcccggcatgaagattatcacagacgtctatcagaccaacttcggacagtactatttcgatgagattctgtcggtcctgccaagcttctacaagttcatgcacaatgactggatgatggactatgtggagccagcgcctatcaacttcatccccgacgaggaggaagtcgcacgtcggctcgcaaaggagtctattttgcgcccccctgagcctaccccagccgagtgggctatgcatatgctgacacacgagttggactttgctgtcaagcccggtgaggatcccatggtcgctgtctggcagattatccacaccctagaaaacttcggctgggacatggaggaagtcaaagacctgatgggcctggtggatccgaatccacagaaaggcaagggaagttcggcccaggaagagcagtcccactgtcgccttagcaatgagccccgcaacattcccctgttcgaaactcctaagcaggccctcgatcggactatcaatcatttccagaacccggaaaggatcaagcccgttatcgcgcccgaggtcatcgcgaagttcctcaaggagaaaaaggaaaagatagaaaaggaacaggcccagaagaagatgcccgaaatcacgatggagatgatcgtgaagttcctcaaccataagaagaagatgatggaaaaggaaaagtcgaagaatggacccaaggcatcgggtgagaagaaggctaccaaggatcaggaacctgaggtacaggccaagaatcagacgcccgatatcacgccggaaatgatcgcgaagttcatcaagcacaagaagaagatgatggaaaaggaaaagtccaagaatgaaacccaggcgtcgaagattacgaagaatcagcaacctgagggacaggcccagacttcggatgagcagcatgatgcgcaagaccaggagtctgagggacagcccaagctaggtgcccggactccgggtgagaagattgcgaagaaccaggagcccgatggacagcttaacctggaaccaacggagacttcgaaggagtaggctggtgagaagaatgaggaaaccgagactgaactggagggggactattagtgactgcaaggtcactaactagatgcagctatctgtttacgaggtgatcagtctgctgcaaatctgccggggggttttccgaatatgttttagccaaatgcagcacgagaaaatgaaattcatatggatatcaaaggaacattgacaccctcgtatcgtacgtagtcttatattatcgaacaataatctgttcctattgtttaaaaaccccaggtcttgactcaaggcctcagcagtgacttccccatggtcttccgtccttccagatcctgttaagcgagttagaatttacaatgaggattccacgcaacgaacgacagagactacataccttgtgcacctgagcaatgtcctctagcggatatatgttgtggatcttcgtcttgagctggcccgacttcagcaggccaaacagctcagttgtgtaggatttgaactcttccggagtctgtatgtatccgaagagcgtagggcgagcaaccttgacacacttgggggaaagtttcctatagaaatatcatgagtatcactagccaagaccaatatagagaggggaaggccatacgcaagaggaagcgggggcacaggaccactggcattgccaaaccagatgacagtacccttgcgcttaacagcctccaagcttccctcccaggtgtctttgccgacagaatcgtaaacaacatcgacaccacgaccaccagtggcttccttgacctgtttaacccagtccttgccctcttcgctgcggtagtcaatcaccacatcggcaccgaggctcttcacaagcgcacacttctctgcgccgccagcggtaccaataaccttggcacccatagtctttaaaatctgcgtcataaggaagccagcaccaccagctgcggcgtggagaagaacccaatcgcccttctgcacgggataagtctcctttgcgaaagcaaggacggtcataccgctcaggaacgacgccatgacatcctcatcactgatcccctcggggatcttcgcagtgtgggccgccggcactgcggtgtactccgcatacccaccagtagagagccatgcaacccgatcgccgacctggaagccagaagtctcgggaccgagagcagcgacaacaccagcgccctcgcggcccaagatctcgggcttgggtgaggggtacaggccagttcggaagtaggtgtcgatgtagtttacaccggagatgttgttgcgcactagcagctgtcctgcttttggggtaggaactgggtatgaggtcttgaattgcagcacctcagggccgccggtctgctcgaccactacagccttcatggttgttgggacggacatgctgcggattggaatgaattggtttacaagaggagcaatgtgattgtgaagtagtgcgagtcgaggactactacgtgtaagagagcgaaacatagtaaataagtaggtggggggtaagagagatgttaagacatcagcttcatatttgtcatcggatccccgcaatgtccagagtccggcggaattgttgcgctcccttcttttcttttcttttctctttcttttcgaactcgataaattccaatcttagtgtttatacggaatacagcgcatctgactttgataacgcgcttcatacaggttcccaaattcaacatgattgacatgtcgactattcacccattttcacagggatatgacgccatttccgtcggaccacccgtcggaacaaggctatgttatgcgaatcattgcaacagcagtgcaacatgggcttgtcagggcaaggatatccaacagatccaatgcggcccttctctgccaggagactcatagcgccaacccaaagcccctggccagatctgttgctgtattagcgcttcgttttccgtacaaagtcaccatgcaagccacccggagccccatgaggggcaaatccccacgacccacgacccggcatatgtccgttagcccctagctgtgcatgaggacgacatagagctttgcgtgtcatctgccgctgactgcatcatgaaaccttggaagaaatagatctcccccgctccataaacttgagacaatacgcaggccactagcctctgatcggtccgatgtttcctaaacaccagcgcccctgaagaacgagatttccacttgttgcccaatgatccgatatgcatctaaataaatcaacctgaaacgcagcggcagtacccggggggttccacttcgtgcccaatagtcaacaggctgccatagccacactgtcttgtctgcgcttccactgcccttgacttgtgatttctcttcagcctgaagctattcttgttcgtatttttggtcttgcccaatcactcaaatggcctatcagaggtctattccttcagggtgatgcccgatgccatccactgatgcttatatacccctgtacacccagctggcgcacgcactttaaagcgagcatctttgtctactcccacgaaaaattttctctctctttcatacgcgccaccattttctgctcccctgcaaactttcgcctttcaagtccgactacttatactatgaaccacatttcccgagctattctacgagacggtaacgcaccaggttaacgtcctcaaacaagcatatcccatacaatctgtgtggcaaaaataattccatttggaaatggcttcctctcgaagctctcgacgggcgcgaccgcaatggcctccggcgccctccgtcgaggaagagccccagtccctctcgaaggagttaaacggtctctccaagcttggagacaagcccgggttcgacggtgttcatataagaggtgctgtcgatcagtatcccattatagtcgccgccaactcgccccctccatcatctacctcccctgtcagtgttcccggtgtgtctgggctcgggagtgtgtcttcggatgaaagtgcagggccaaagacaccgcctcctcaagagccgatcttccgaaacaccgtcaggtttgagacgaatgaccggccaaaatacgtgtcgccctcaactgcaagccaaccacgcggcccagcacctcagcctctggcccagcagcagcccatccgtgagcttaacccaccgcgggtacctcagccgccctcccatatccgggatagcaattttagtagacacgggccgccaatgcaaaacacgtctcatggctctcgcggacctagcgcgccggatcgcagtgatgcgcgagcgcccatgcaggacaagacttgtctacaacctcccgggccttccatcggtcgatcaaacagtgcgagatatacccattcgacacgaccaatgccagaacgccttcgacgggagcctagctcggggtatttgtccgattcggccaccacagacaacagaccaccgcaccggccacagccgcctgtgtccacggcccctgtttcagctctgccaaatgggcccaccctcgcagaacggattgaggagaagcttcgccaacgacaagaacagcgggacccgggttttgtgtcggatccggaggtacggcaaatacccacaactgtgaagcccgtcaaaccgcatattctcaacacctctctgccccctccgcctcctattccagcaccagcatcgcactcgcctttgcgtggacctcagcgtgtccccgcccaacgatcacagcatgaactgctcccggcctcacgtgcccgcgcgacatcggtgacaatgccgcctacccggtcgatgtctggatctcgccatccctcacgaccagcacctgagatgaccaagcctatatcaaccccactcaatcctgaccggtcgctggctcatctcgcaccgactagacccgcagccacatcaccacagcgccctagctcggtaggcctgggcctctccccatgcccgcgaaccatcgccgtagcaggttaccaggattggtatacgctcaaaggcctcacccacctggacatctgtccatcctgcgtgagccaattatcacagtcccgctaccgcgactacttcattccaagcctctcaaagccagccggacaaaagacacgatgcgccttcgccaacgcatggacccgtctagcctgggcccagatgataaagaaacaacacgacagcctggagcttttgtaccaaatgacacgcccaccaccaggcatgcgcgtctgtcccggtcgcatcgtcgcagaacaatcctggcatcgcatctacgacccggaaaccggcaccgatctcgcaggcttccacgtctgcaacagctgcgcgcgcaatatccgcatcctaatgcccagccaccgcgagaccttcctacccagccgggatcccagcgagcggctgtgcgacttcgtcacgtccagtccgcgattcgtgaaattcatcgatctcctcgatgcgtctgcatcccgtgctgaagcggactcctcgcgcacccgtcgcccggatatgcgcgagttcctcaactacgcgcggcgcaaggtcgtgctgcgtgattgccgtcgcgataggcctgctctgagtacgtggcactttatcccgtcactgccggagatgtgtgtctgcgaagactgctacgatgaggttgtttggccgttggcccggtctaatcatcccattgcgtgcatggtcacgacgaagatgcggatcttgcctggtgatggccctggtcggactcgtgaggcgagttgtcagctctactcgccacgtatgcgggcgaagttccgggaggcggttgttacggatgattttgggttgttgaggtctgtggcgcagaggagggttgaggccgagcggcgattcctggatcgaagggaggagttgttggttgcccaagcgaaagggtatgattgtgatgaggagatgaggaaggctgttgatgagtggaggaggtgggaatgaggtttatggctgatgactgtctgtctagtttccttcatgtgctttgatttgtgtctataaatgcatgtatacttgggagcattggggtgtacaatgactggagggagttttgttttattttgtactagcatagcatagcatatatataaagtctgcctaggtagaacatagccctgtattatccggtattagccgttgtcatattatcctagcatttgcttcttctatatgtctttctagatgctctatatcataatgtagtctatcgtcgttgcctcagtagtaccttcctctagtaagtaaacatctctttccaaggaaggagacttgtcagctcttaccctctagggctattgccatatgagctctttggtacttgcaaattcgtctatttgattgtctctttgacacctccgccttctgatccgaggctaagtggagcattcggtaaagaaagagatccccatctcatcatagtcagcgacatgctattccaagcttgtacaagattacaagctacatgcacattgagcagacatccgtagatatattgattgtatgcaataacgagccacaaccccatgctaagtgaatctagatccctgactccatatctaaaaagaagatgcaaatatctaatgcaagcaagcaagaaacagaaaagaaaaccaacacctagcccaccaaccccaccaactccccaggccaacgctttgcccatataatagcgcgtggaggcattctcccaccaacaggcgcaagcacacggattttacccttgtccacgtcaacgtcggcaacatacaagaagcccatgatactcgcgtcgcggacttcagcgggggatgccgtggtaggcgcatgagtgatagcaaggagggtatttgccagagcggagggagcgggtggaaggacctttttcagcgggacgctgctgctgctgttggcattggcattggcattcacgttgtcagcgtgctctgaaaatgagcccacaacaccagggagcggggcggcccggtccgggtcttgctttgtttcttgtgaggcgtagtcatccatgccacccccgccggggaggaaggagtcgcctgttcccagttgggaagggtcgtattcgtcttcgtcttcatcgtctgccgaggagacgatgtagttgtatacggggagggaggcgaagtcaagttgctgtgcgtggggggagagagtaatagcggaagagggtgaagaggaagggatagggttgccgaagaagtaggagcggatttgggactcccgtgttgccttgcggaaggcatcgtcacggtcgacacagccaccggatttggaaagcttgacgacggagatgtgctcgtcgaagacagcggctgttgcgctggaggtgggcttgttatcatattgtctagcaacggtgctgtataggcgctccgaacccagtactaggatcgttgtaatcgagaactctgtgacaatatgattaatgagctccatggtgccaggcttgtctgtgccaaggatcccgggcgtatcgacgatgattcccgtttcgcgcgcatcctcgtcttcggccatccggcccgtgacagacaatgccagacgcgagacgactggtcggtacacggcgccttcgccatctagcgggctttgcatcgggtagctatacacaagcggcagcttgacaggtacggggctgggcccagacatgggactgcttccccagccgtcttctacgtccaagatggtgcggaaggcagtcgcggtcagtgtgccagggacgccaagcataccctccgtagggtcgaggttcacaaccaacggctgacgaccgatcttggtcgcatatgcagtcaagatcttagccaaactagtctttccggtgttttcagagccaagaagtaggacgcgcgggccatccttgcctattgattgggcttcttcgcgcattgtctctagcgcaaagtggacgtttgcatattctaccattggcgtttcctcggccgtgtattcgctttgacatcctcctgcgccgtgacccactgtcggtgtgactccatcggaggtagttgatgttgtttcgaccgcggtgacttcaagtgcacagccatgccatgtgaaaattgccgcctttgtgccggtgaatgtgtaggtttgcgattcggcaagctctgtaccgaagagttcagccgttccgttgagaagctgcacagcttgagtcagaaggatcacaatcagattagatgagataacatacctttactttgatgatatgtccaaaggcaacctcgaaccgccattccgaacctggggtcaggttgatttgcgatggtggcgcgggtgcctgcgatctttcctccgatggctgggttagctcgaggcctggaagtgacatgttactgatcaatttgagaaatcccagaggaaatcccagaatatgtgcaattattgaaggagtgaaagaagcatatcgggcggagctacagcatggatgttttacatgtttgcattagccgtttactcagctgtcattggctaaagtgattacctccagagaactccgtactatgtagttagacagatattgttaaataactagatatgaatggcttcagtgaacgtacatctgagagataagtaactggctagaatattcacaatgccccaatacgctgactagtcgttcctcctttggttcaatatttggctactacttcgtactccatgctcaaccataccttgaatagcactgggcatttattgcattatcacattgcataatagatccattagaggtaaatgcagcgacttcatccatatcatttttcattgtttgcgcccacatgcctggtgattgccttcaattggtaactaaccatgcctcacttcagcttcgagtagaaaaattatgtaaacattagaacattgaaagtttttggtatcagctaactataccaagattacatcaaaacagatgataacctacaagaaacataattggtaacattgaagcatatcactgtcattgagcaatcgtccttgactacttggagggcagtagaatgtgggagagggggaaagttggtatcaggagagcaagggcaaggggcataaaatgagctaaaggcaatccaaataaccaagactggtgcaaaacacagggagagggaggggaggcaagatattaggaaatggtgtcaataacaggcagagggcactcagaaccagcgaggaatatatttatggtaacgacaaggggaattgggcatcagaagcgaatatttgggtagctgggctgtcgcaagcgacaaacccgccgaaaagagaagactaaaatttcaaacaaactggactttgtcaagcaaaacctcattctgtttagaagaagtatgggatggaggccctatataggttaggattgattcgggatcttcgtggcatgggatgacttacgcaagggcaaaggccacagagacaccaaagatagaacggttgcggacacgctcctgcttgagcttgttctcaagcaccttggctttcttggctcgttgggaagattcagccgatgtctcttcatcgtcatcgtcctcggccttgcgcttgccagtcgccttgatggatgtcgactccacagtagcgccctcggcatgcgccttgatagcctcttccaccatctccttagcctgggcgatcatctcttcagtctccgcagcagatggcacttctgggagactaatgggcatatccaaggaaacagtagtgtgggtaaacttgacagcatcggtggcaccatcggtcagtaatacctcggctttctcatcctgttccttgatttcctccttcttcttctctttcttctcggccttcttcttctccttcttctcctccttcttctcctcttcgggctccgccgtattagatctcgttgacttgcgcactctgatcttctttccaggagatccgctcgacctcacttccatttcagcctccacagctcgcaactcaggaatcgtgtccgagaggcctgaagctgagatatctaatgccgactgaaggctagcgtttgcagcgattgtagacggggtgttagtgacatcgttggcgaggcgggtgctacgagacttccgaggagacgccaacctcttgctcggagaagcggaccgacctctgcggttgcgctgcgacacggggggctcatcggagggaatttcgaatttcggcggaggggtgatatgcttctttgcgctggaaggaatgtccgttgggtccaacagtgctcgcacccaatcgtacatttggtattccttggagagctcaagggctaggtatgaagtcaggctttgtttgatagagagaacatcccaggcagaacataccaaataagggcgagatccacacatttccagcaacttcctcctcgcttgtgtactcgcgagccttcagatactcacgctctgttctctcttcctcggccttcgcccatgggaatgcaattttgaacattccagtcgcgctaacaaagccatctttactacggcgctgtaatgatgaggcccgaagttaatgaccgtcggcctccaaaataaacaaaacaaggggtctcaccatcaggaagtagctttctgggtgttgctgggaggtgtgggaagggaagatctcagagccctcgagatccttgggcagcggagcacggaggtgagcatactcgaatacgcctaggttctccggcttggtggcatttgaggtgccaatctgggccgccttgacggagaggttggtttgtccaagacgacggcgcgcaaggagttcgtcatctgtaatcgagagtaacacgaaatggttagcgatggcagcacggggcgggtagatagccgatgcgcgcggtcgcgccaccacgcgccagtgtttgtacttacaagtgggagcaacctcgaccgtgatgagtggattaaactgctttggaagtgatcgcgacatggtggggatggatctcgagtgaagtgggaatgaatcttagaggatcgtgcgggtgttctttgaaggaaagatgcgccaacgttggccacgtagcaggcgcgtcaagcgataaaaatcaaaggatcaaatatttaccgaccgatcctgtatcttggtagagaaccttacaaccaaaattatgattgataacgggggggaaaaaaaaaaaaaaggtcacccaagataaagaagacaatcaggagagagaagatgcgagtcgcgaataatcattgcgtcgttctgaagcttgacttgttccggtaaggtccggtaaatgggtggtcatgtgtggtatttgaggagtctggttggccaattactctcagacacagtatcggatttactccactgtatctcatttggccccgtgacattttacatttcgggccaacatttccttctttggactttgatcttcatctactgggaatgcggagatactggagcatgtttacaggacattgtttctatatgtgagtgtgattatatgcactgtctccatactgcattgaattgcttacagaaaccctccctacttttccagggagtacatataggtatgtatgtttacatatctatcaacgcatcctacgtgctttatatagagtacattcttcgcaacaaacctacaatctatgttgtacatacatcctaaacgcgggcaactacgtatgtactccgtacctccagtggtctgatcatcggcccccacacctagttggggcatagttggggtcttacggagtatacatacgctcgtcccaattctcttctacaatccatacaatgctgtagaaagcatagcctggcccacacaatccaggcaatccaaactcctggccaatataagcgtgcaggatcaacagtgcgtaaacgtgcatatggagtactccgtacagaagtgggaatccgaatagcctcgcccctctcccaccgcctttctacccccaccaaggtctcaggagactattcgagctttagcccttttcactttcctttatcatttcgagtttccaatttgtttttcctttttcctcactgtccaacttaccccttttccacgacatcacttccccgaacttcaacccttggttcagtgcccccgctttcttaatctgtaaacaatggccgaccaccatgacgatgagctcgcttccaccaccactgagggtttcaaggtcggagagaagaagacactcgatgagtacaaggagctcggtacgttgagtgatctgcaatgcatcggcaatgtctagccctgatctccccagctaaccgtctttctttcccccgcaatagacaaggacgatgaagctatgaaccgttggaaggcgtctttgggtctcaactccggtgagcccattgccgatcccaatgatcctcgcaagtgtatcatcaagtccttggctctgcaggtcgacgggcgggaggatgttattatcgacctgtcctccccgggctcagttgacagcctcaaggataagcctttcaagatcaaggagggctccaagttccacatcaaggttaccttccaggttcaccacgaagtcctgagtggtctcaagtacctgcaggtcgtcaagcgtaagggaatccgggtcagcaaggatgaggagatgctgggcagctacgcgcccaacaccaccagcaaggttgactactccaaggaatgtgagtattcaaacctggcttctatttctatgttttcaagtatggcttttattaatactattccctattagtcaacgaggaggaggccccgtctggcatgatcgcccgtggccactacaacgccgtctcaaagttcattgatgatgaccagcacactcacctgctgttcgagtggtcttttgacattggcaaggactggtaaacatgggttgagagagctatctcgttgttattgagcggccgtttgttttcaaagcgtgatgagtttctttctttgacaaaactgttagagatgtgtcccactggggctgatgctttggattcctgttttattgtttatgcgtcatactaagtctcacttattggtgtatgatattttcatagataccaagtagcacatctagctgtttgtaaaagcgcagccttatcccgaactcctgtctagtgctagggttagaaagaaaaaaatttgaaatacataaacattaacgtcaatcaaacattaacagtaacagtaaccaatgggtatcacgagaagattcagagattcacaagaagtagtcgacaattggaccagagccatccttgctctgctgctgctggcccagctgttcaaggcgatgggcatcgttctctggtgcagcatcaaaaacattgaaaaaccgctcgccagagtcactcacttcgagcacactagccaggtttccacagcggtaacaatagttaggtgcactccagaccgtgctcaggcgatcatcgtaaagaacctggtagccttcttgacagagttggtgtgcgcgtaggatgtgggacatgctgttcacctctaggaacttccgcacaacctgcgctccaaaagtgtatccggcgccgcggggagagagtgagaattcatcgcgttctgtatcggggtcagaccagaccaaatcggccatgggaccttcgtgtggaatctcgcggaaacggtcgataatcttgatttggtcaatcgaatggatggaaggtgacaagccgccatgtacgcaaaatatctcatcgttaatcacaacgctcagtgtcaaaaagtcaaacatgtcggtgaagtaatgccagacgttagcgttgccatatttgcgcgcgcactcagtgtagaagccgtatgattgggtgactccgcgcgactcgtggttaccgcggatgaggtgcactcgttgagggtatcgtaacttgagacacacgagaagtgagatggtctccacactaaaaagtccacggtcgacataatcgcctgtcgattctcccatcagcaaaacttcataccaaaagcgagcaacaaatgggttcaagctgaggcctgcttccatccccgaacagagtattatgcgtgtgactaaccgaggaataggtaatttgtatcaggacagcggccaccgatcctgaaaatctcgatcatatcaaaaaattggccgtggatatcgccgaccacagtgactggagcagcaatatgtaccacattgctctccttcatcaagagttccttcgccttgaggcagattgcctcgatcaccgaatctgcgagcagctctttattgtagagccgagtgatgcactcatctagatcgatattcgctgtgaagcaataggttaacataaccacggagacaaccatatcatggaatcaaaaaaaccatgcacatacttggtagaccaggcattgtggcgagatgcagatacagtgacctcaagacaaatgagcggcaatgactccttcggggtatgatacttgttgttcaataacagagagctccctgtaccttgttcttgtgtcaaggtagacaagtgcagagagctaaaggaaagtgatatgcgagaggacggaggtcgaggtcgagatgggatgttaagaagacgatgatagaaaggatgggtgcgtcaatctagcaaaaagcatcctggtacagccgatccttatttccagtgcaaagtgaaggctctggaattaaagatcaagacggcatcacggccgaactgcgggatgagctcaggcacaagcaaggttatatccacaccgcctttattcgtacacgccttaatttcaaggccacttttagccaactggccactatgtactattatgtagacaattcctttctcggtcctcttggtcaacaattcagagtctaacaatgattagactcaatacggtaggtccctcggctatgggtagcgtggacatattaacgcgcaggatgataacttcaggtcaaaattctctcatagagtcccccgagtcgacgcatttacaagacaatgttggcacccgagacatcaacatacgtcctcatgaagtttttagtacagcaatatcggatactcgtgaagcgaaccggtttagcccgatttctaaacaaaaccatgaacgttggccgcattaactatgagcaaaatatataactagagtgggaaccgcttgttcctctcaagctccctccgggctataaagtagcttcaggtgcagtgaaacactatccaaccccggttatatcactgtttctcttgcctgtgtcgggcggagtgctatcattggagcggccatagacaccggattttaccaatccggaccctgcttccatgctctactgggaccatataactactggattaaatttatccggtgaaagctaccttcaaattccgatcataccgcaactatctatctatacttcgtaaggatgttatatcattcgacctggcttctcccgaagctggcacttaccctccatttttcagggcttaataagacagacaggcaaaatgtgtaacttatacatcgattttacgcgcaacgtagcttacatctgcacaacatagttatcaaattcactcggcctaatcgggtaaggcgggtgcgggtcgctgcgggtcaggaccagagtgggtccggggtatggtcccgtggacagggtcaatgcccaggtgcgatctgattgctgactgagcatcccgaggtctagatggataggtaggaacattactcggtataacctgagcacagggcttcctaggtgatgttttccaggtcagtgaccatcatctgaaaacttatctagtacaagtgagtagtaattaccctgtgtggtactcagtgagcaggagcggcagcaccctgatctgggaaatggcgatcgcggtcagaatttacatacaatgtcttcagtatccttgatatagcccagaagtgtattcactcttctaaaagactcaaacatctaccttgaatttgtcccaccgtgaagtggcaacccttccatccttgatcacagccagaatgtgatcctcgacttgatccagaatagtgatatcctccaacggattttgcttcaaaatcaatagatctgcggcaaatccctcattgacctgacccaacatattttcctgcataagaagacgagcggcattgacagtagcactgcgcaaaatctgcaatggagttaaaaccgaattgcgcaccgagaactccttgctctgagcaaagtgcatcgggccaagaagatcagttccaaagcagacggtcacgcccgcatcgacagccatcttcagtgtctctaatcccttcttaagaacctcctcattcttagcagcgctgtcatcagacaggaatttcatctgctgaaacatgacatgcgtaatgagcgtcggggtcaagaaaacatccatctcagccatcatcttcgcggtctcgagatcaacaagatttccatgctcgataccgcgcactccgagcttgatagcctgctggatcgcctgcggtgtgtagctatgactcgtgacgtatgtgcctgcattccgcgcaacggtaacgatagccttgatctcttcgtccgagaattgcacatgttcaatacggtccgtgggactcgcgacaccgcccccgcccatgattttgataaaatccgctccctggcgcagctcctcgcgcgcatacttgtagcactccgctgggccgtcgacaaccctgctaatcccggagacggagccgccgcagcactgctgggagttatgggacccgcgcaagtcgccgtgtccaccggtttgggagagtgcgtgtccagcaatgaagacacgagggcccggaatcacaccgtccacgacggcttcttttatcgcgaggcctgcaccaccacagtcccggattgtcgtgaagccacggtctagcatggatttgagcagatatggctgtcgtaggagactgactgcgtcgctcatatcactgtaggcctgtagactggattcaccgggaacgactgcgatatggacatggcaatcgatcaggccgggacataggtattttccgtcgaggtcgattacattttcttcggggacgtcatctgtgatggtagttgagccgtctgtcacgatctgaatgatcttgccttctgcgattcggactgtagcatttgggatcaatttgccctcggctgggtcaacgatggttgcgttcacaaagaccaagtttctttgagagttgggtttccagggcttgataatccgggagatgtccatatttgcagtatggttttgctgattttcttttggggtgggtgtgtaaagaagtagctcacccactccaaatggaaaaaccgagcatttcaacagcccgccatccggcccggtcatgcacgttgtgttcgtaggtgatgatgatatgcgggtacttgtacccgcatattcccattcagtcgttgagtgccacagttctccacccaggctcattacttctgtattggcttaacactttaaaagccagtacataatgctttaataccctattaatgcattatcaaaaagcattaggtgccctttatagctgaccccgcctatcttctgctactagtagacttcctctataggtacgtgggggtttggcttgtgcattgattatatgcattagataccgggtatgtacctatgttgtacatagtcaaaaacaggcgtatcaatcatcgtctatcttggtttcttctttaggcactctcgactttgaaatgcgggtacaagtacccgcacggcaaatcactgacctatcacaatatatagtaccatggagtggtacaatatatatacatggtatttgacaacaatccctatctcactaggcaactatatccctgatgtagtacagtaacactgcagcataaagcaacaaagtatataatggcagtccggggagtccggggagaccggatatagaatccccatactgtctcagctatttatgaaccggttctgctgagttcattgattattagattctgtcatttacttgctcacattggatttggctgatctagctgctgcttggcgttctgattctcgccagaggcagatatgggtgggagtaatctagctagacgatactttctattacgtgctagctaactagttactgaagtagttactggagcagttgctcaagcagtttctcaagcagttgattaagcagttaataatgatatgacaaagggggcttgattttattattagtttacatacaaattgtaggtacctactgccttactattaccaaccatatggcagggaatatgcctaattgtgaaggcggggagaatgaaccagtaagaaaggggcttttcgcagcattcgaaattggaatcagtcgcttcgctctgcaacgactatctggaggccttaggtcgtggagatcactagtaagaaacatccaagatgccaccaaacattattcagattcatttcctcatattttctcatattttcaatatacccaaaaggttccccaatcaagccagcatctataaattcggacacgtttaaccaagcaactgctgtgcctctttatgcacagcttcggtttcggaatctgtctcttcttcagagtcatcatcttcttcctctgagccagattcttcttccgaatccgtctcctcttcctctgaatcagtttcaccttcttcagaatcagtttcagactctgtctcagtttcctcctcctcctcttgtagccactgatcaagggttttcttcccaactaggtctacaggcaaagccggtccgtttcggcttgggatggaagtgggcttgtgttcgcgaagtgctttatcaaggcggtcacctgcagtcatggcggtggagtcgctggatgtgtctggtttcacatcttcgatgcggaggctgggatcgggttcttggcccggctcaacccagtctgggagattcgtgtagcctcgaagtccgtggtaaccagcgtcagggccgacaacgagagtggcggagccgatgagcaggtccttgcgcgtctcggatgggctgggagcgtggggaactggctttggtgccaggagaaggagattggcaagttgggtggaagacggagtttccaggaggctcttgtagagacgcgcccggtcacgcaggtcgtaggatgtgtcgtaacgtgcaagaaggaggatataccgccataataacgtgatacggtcttcggttgcttcctctgtttccttctgttcagtgccgtcgtgttcttcacggctctcctctccctcttcgacccgctcagcatcttgcggttcctcgttcccattgtcagtccattcgttgtggaactcttgttgggatttggctggggcttcagggaatgacgacgatgcaggttgttctggctgctcctttggtgggttctgcaagagatggtgtaaatacaccttggcaccaagaagaacagtctgctgtttgacaatttccatctcgtctgcgaatcctttgatcaatatacggagcacatcaggcgcgatattgttctctgggtcaattccagcgaactcgccaaccagccagataatagtggctcgtgcgtctggatgggttgttgaacctaggtgcttgacgagctgaagaacagtctttttatgtgaagctggatcttgttggatcaagtgacgaataacagtcagtgactccgacacgaggttgccgtccggactagatatctggccgagaagaatccgtagacacatgcctgcggtacttgtgtccccttgcgcgcatcgcccaatggctcgtacactctctcgtaccagctccgggtctgtgtctttagagaagtgctctagttcgctgattatgacccccttccagtgttttccacaatgcgggaacaagatggttagcacctccagtttgaggcgccagatatgtggggggtcgttggcgtggacaaggaaatgggccgtgtatttcgcaaaaggcttaggcacccttagagcaacggcaacaatgttgtacagagcgatgagctgcatatcctgtggtgttcttaaaagagccacaaggggaccaactgctgatgaaatatattctgatggagcaaggtaaaggaagcaacggacaacgctgacaatgacggcagagtttctgctctgcagtagaaccttgcaggctcggagtagaagctcaagatcaggatccattaccgtaacttcgtactcttcaacatcattctgcgtctcctgttgttgcttttcatcgtcgtaaaatgcccccggggctgtgcgcttaaccgtctgagttcgttgagggaagcattttcgcgcatagaatgtcaacaagcgcaatgttgctagctggccccattcatccatatcgaccagcttcttgactaagctgcgatagtgcttgtgaattatgtcaatctcatccggacacagatctaagaatgccgcgactgcaggcccgacgacaaagtattgagaatcgcccaaaagtgtctcaagataccccatcagttgtggcagtgtgttcgggtccaatcgataacattttgggatagccaaagcggccgctttgcgcacgtgtggactcatatcaccacatcctctcttgatggccagcgacacaatctggctgatcaccggaacccggattcccgacatggtccgaagcgccattgttcgaacctgcgggcttgaatctgtcagcgatttctggatcgcattgatggacagtagtgccagatccggctctgcctctgcatgatgaaccaagtagatgtaaaccaatttcttgacttcgaggttggcgctggccacattcttgacaactgctgaaaagaaagtaagggatggttcggatcgatacatcaactagaacaggaaattgagtcagccattgcgttttccatagttcttgttcacgatcctcgtaccgagatgaccctccgcattccatccagaacttcccgctcatggcgactgtcaaggagcttcttgatgtgcgcggggctgtatgttcgcgaagtataatcggtgtttgagatccgattgatagcagcggactgggcagcctctaatgtgagctctcgggctatgcgcacagtgacgttccacggtcagtttaggccaaataggacggattgcaacccaatccgacatacctgtttccagcatcgaggatatcctggaaattgtttccatctttccagtttctgaatgcccagtccccaagggccttggctgagttggagggaatgggtgagaggtgaggggaggaaaggcggagcagctccgcggaagtgaagtggacgatgccgtaactcttcaccccgatctgcaacgttctgactactatttacacaccacttgattcattatctacgactaccatgaccatttgtgtttgacgggttatgagttgaagacgaaatgatccatctctcgttgatgacctcggaggggcaataagtgggagctgaacacagctatctgaaccaatgggtccaacatgcacggtcgctcactgcgagttggtctctgacctcctgcagcaactacttgaaggcaattcagatacgtaccttattgtctgcgcaaccaaagccgagttcctagttcaactcacagcagccatccgctcacaatgcgctgatccagacatggccgcgagccatggcctgctcacgaaaacaatcgggctgcttgcaagatccagcaaaatacgactgttattctgcccgagcttagagtctcttcgggcataccttgccattttcgatactgctgttggcgtagctaccgaggaccgatcgcttgcccatgatcgacaactcattgctgtccttgatatgatagctttgcatgtcacaacttcagagttctcggcacaggggctttcaagaacactcgcttctcttgttgaagcttcctccagggcggggatggatctccaggtttatgaatgcgtgaatgccctggacccttcaagtgctgttcgggggaaaatgctatgggatgtgagcgttcccttactgaacgggtcagttcgaatgcgatcggatcaaagtatctggagtggacggggcgtcaccgtaaaacgggttggcgaacgctggtttgaatttgaccagaactgggaaagaatggaaaacgcttaattctgatatcagagatgatattgtaacataataaaactcctgaatttgcactatccgggtatcctgtagctgaccgctgaactccgcacataaataacaactgattgatcatagagacttctccatctctgtcatgtacagcttgatatgtgactctaactttaggtactgatcgtgggctgactgaatctcggtctcaatgttctccttcaagtcaaccatctagaagagtgggttagcaatagttcatcacccacgacacagggtaagacgtaccttcttctctgtctgttcaatgcgaatacgcctccgctccatatcgcgctgcttctccgcacgctcctcgcggagctgtttttgcacatttcggagttcttccatgcgtgcctgcgcaagttcggctttctcctgtgcatttttctgaagtgcctcgatgcgctcgacccaacgggccagttgacgctgcaagagcttctcggtctgctcgacctcgcggacgctgttccccctgtccgaaatagcctctgcagttctagcagcacgagactcctcttcatcctctttttgcatctcagctgaaatgtcatcgagcaatttaacacatccctgcacatcattggaaaccacggtgaacgtatccgaagaggtctgcagtgcgcgtgctcgcctctccatcgcatcaatggaggccttttcgcgcatcagattctcggatagttcagccagtgaggactggaggctggccggagactcgagcacataaggccgcagtttctccgcttcttgtcgagaacggacggttcgttcggttttctcttccaattgctgctgccgccgagctctttccgtcttaactcgatcaagtgtttctgcgactcgcgactgctcccgacccagttccaatagccgcgccttaagcgcatcgtttcgggaaactttctctctcacattcgcttcattggattggagatcctgccgcatttccctcagccttaattccatctcctgattttccgccagaagttcgtctatgcgcgatttcgttttttctgtcttgttaaagtgctcgtcgatcacaggtgtttgcgattcccggaatcgaacaaagttaatcaagtacgagaatattttgacgagtcgttcatgcgtcggtttggtcaggtctgtgaaggtgaagtcgttgacaccgcactgttttgtactataggcattagcatactcttcggggcttttgtagctagtgatgagcagatacctccgccaatagctttcgcagcatcataaagaaacccatgaggttgcgagtgtcattgggaattatatcagggtagtcgccgcatagatcttctgcagctgcatgcattgcgggttccactgtctctcgagtcgtattcatgagcagttccgcgaaccattcgaacaccatctggatttgttgggcgtttggtttagccaggtcggcgagggtaaacggtataccgatatcgttgatacatcctgcgatctctttgtcgggctatttcatgttagtatcagacgaaagctccggcaaaaatcaagctcaccaagcgcatgagggcgtcattttcgtcctccttcttgcgaccccgaccgtggtgctggttgccttggaattgctggctcatacggctgttatatcccatggcggtagagttgcgcgacatgatagtctgagaacctatcaccaggcaaggggcttattatcgaagtggataggctaattgttgttgatcggggctgattgtttactcggagacaatcccgcacgacgcccgatcggggttagtgcctggaggggcattgtgcaaaccagacaaacatagaattcatgactctttctcttccttctacattgctttgttcccactcctacatcttcgacgctcaaacagcatggcttctactacttcagatgcggctgtagccgatacgaaaccattcgagtaagtaaaacgcgctccctcgaagcgctcgcacctgctcactgttccttcagcattgtcgcaacctacaatgaactcctccgctccgatgccgacctcactatgcctattgcggccattgaagctctggttcttcttctcacacagtcagcctcttcaacgatatcagagactttggatctactcgaaaaatccaccgcccacctgaaacgctccattcccaaccccatcggtctatctgccggaaccgatcttttccaacgatacctgatcaccacactacaacgccctgggcaactaggtcccgcgggcgatttcaaggccatccgcacacatctcttgtcaaacggacggctgtttatccgacgcgccaaggaaagccgagacaaaatcgcagcattcggccgtggcttcattcgcgatggcagcaccatccttacaaacggtggctcccgcgctgtcgcagcactattgcaaaaagccgcagatgaggagggtggccccgctgtgcggttccgtgttatctacgttctctcttcgatttcccaggattgcaagcagcccaatgaagaaccagagggtatggaaacagtccgtgctctgagagcgaagggtgtgccagtttcaacaattccagagtccgcggtggcatattccctcggcaaggctgatatggtcattgtgggtgcggagggcgtggttgagaatggaggcattgtgtctcgcatgggaacctaccagatcggtctcctcgccaaggctattgggaagccattctacgtggtagcagaaagccataagtttgttcgcctgtaccctcttggtcagtacgacctaccaattgagcagcaagttcttgagttcaagtcggaggaagaccttgaagaggagcgcaagcagcagtcctctgtcactaagacagacggagacacctcaattaagctacccctctgtgactcggttgatttcactcctcctcacttgatctctgcactgatcacagatagcggtgtcttgacgcctagtgctgttagtgaggaattgatcaaaatctggttctgaagaaaagacatgtgatagcaaagcctttctgctattaaattccccatatctcaaaaactttcattccgatgatatggtggggaataatttaatgtgacacctgcatctcatgcggccctcccatgtggaaggatcatctcaagcgagcaagatgggattttccttttcacacgtccaattcaatgtggatatctatcacattccttccagtgtgcagcacaaagataagctgcaggacgtgggcaaatcacacccctctctttcctgtcaatgaacaccttgacataaatggaagtggatatggaatggtttccagttgagggttttttttcttgacaaagggcttggttgaacgcaaaaaaaagttatcaacaaattttctcaagtcttttagacaaaggacagaattgtagtctggtctcctatggtatcaaacgtctctcaaaatcatacagtcatcatcatcaataatcatcaaagactctatgttgtagttgtagcggagccccttcgcaatctcatgcgttaaacatcatgtatggaaccctcggagggtgtaccttttatatggatgggttttttgtccgagcctcctggacgttaagatatccagcctcatatctcttcgcctctcggttcatcaaaaagacagtcgtaggaatagtcgtagatcataattcataattggccattcgagtctcccaaaggaatagctcaatccgcagccgagcatggaccgaattgtcacaagacaaaaattgaaccgaggcggtcattgtctcctaacctgcctatcacaccatggcaaggagctcaattggcaatgcggttgctgataacacaccattcctgtgtttgcatcccagcgaacgcatacagcagcaagtaaccaagagccacgaatatccacaaggctgccatgttggaaggatttcaatcagaaagtcggtgaaggtgaatgggatttttatgtgtgatagacgataaaggattcgaggggtatcagacgaccacgacgacggggtcaggtcaatggtgccagcgtttggccagtggagttattgtgtgctcgggatgtatgctttatagaggtaaggaggtttatgagtaatgtcaggtgctctgttagaagacataggaaatagagagatagagggacttttctctgggatctcatgctctctagacattttaaacacgaccagaccgacaattgatagattctagagtgtttttctatcactgacacacttccttccggtttcttccatccaatacgaatgcgagctgggcagtctgtctcgtccattaagattccttgtcggagaaacagatgcggggttcttgagaagattattacttcacacgtctcgagatatgaaacagtctagatttctgtatgtggcatgccgggaattccctttctgagtcatagatcacatatccatcacggatgttgggtattaagacggacgttggcatattccgccaattagggaccggggtatgatcaattggaaattattgggaggttcaatcagtcattagttgtgcgccttgcatccccaagtacatcgtgcatttctaccatagttctgcgaatactatcaagtgatatagaactgcgcccaacacctctcacgcgggcctacatgcatcctccaggaacattaatacggaaattatcgataggcaacttggagggaaccttgagccatatcacagtacaatttctattacaatggtgtatgtggtctcaaatatatatcgtggcctcgtaggtgatactatatgcatgtatttttgtcaaagccctgaatcctgaaacagctatggatcaccatcagactctgcataatcatcgtgtcacttgatatcgagcaaagatagggtctaagccgccctgatcgccaagaacgcctagaacaaccggaagtttcaagcggccacgtcgggttttggagggtgcagctgcatattcaccaaacgccctgaatcctgagtgctctacaagaaagagaatatcgagtcatcccaaggttgtcaacctcgtagagatcaaagaagatcatcaaagacgaaaatatctcatcatgccccacaagatccaaccccgctatccggtccctaaccaaaccagcaccaacctcacctccacccaaaccagagaccccaagggcccaacaccgaaagcatactagtctactcaaacaaactatacctgcatctacgcgtgagatcccaacggccatccgacaggtgccacccccgctcctcttcaacgctataccacctaccttacccgcttgccaacacccaaaagcaaaatcatggatgcccaatcgcccacgacaggctcccggcctaaccagaagttccacctaggatccgaaacccaaggtaccggtccgcagtcaccatccgatacccactgtcatagcggctggtctatcagacgccttctgggccgacgtgggagccgcaactacagcgttctggagcgggagccaaaccggctgaggaagcgcatgagcaactgagtttcttttcacggatgaagggaccgtatcggttggcgatggtgatcaattctggtatcggtccgcgcgcatccgcggaacagaggaggatatccataagccacttttgttgttggatgtctcatcgagtttttggccgtttatttttcctcccggggtcgcatggaatgcgggtctgcatcttgtattttcggcgtttggttagttagcattgggcgggtaggggcatttttttgggaggagtctgtctcatctatcttttttttttttggattgatctaataattggacgattatactccgtaatgcgaagtcattggttgccatctgagttttcctggccgacttcggtatcttgcggtggcagttgccttcgtggcgaattctcaatggcttgaggagttgccacgactttttcccgggtattaactttggaagggagatgatcgttttaaagagggcaatgtcgagaaacctctacattgtccggagtagagggtaggtactgaagtggtgaataataagatcgggaatgagatcttccaaatgcttataagcttacgttttagcgaaaaccaaaataaaataccaggatttgatggcggctgtttgctccttgcagatttagtggctgtcctgctcaacccgattctgggcgttgtctctgccgttcttggcgtctacgaccaaacagtattctccgctgtcagatcagactgtcagatcagacctaactgagcggttgaccgttgtgatcaaaatgcaggaaccacggtggaacaatctgagaccggaagtggagtggtattatattgtaaaatgaaaggtatggagtatctgtataacatagcgataaggtggattccaacagtatggagtatacggagtataatatacatacaacatagatagcgatatagaatagtaccgagatatagaatagagggtaatataagcaaggaggagctctagacaacgccctggatctaatcagaaccaccttgaattgaaaccaaataatagcgttgacaccttgcaacccgctggattctcaatggatataattagcatctccgtattcgtacgtcgcactggtttgctagatgtctttgaacgtcgatgatattgaatagaaccgagggagagattgaaagacaatgtaactataaccattagaaatagaattagtagtaatcaaatgtaatcctatagaaggaactaagacccccataaatgaaactcgccgatcatttccgtattcacgatacacgatagatttccccttacaatactactacatacatatccggtactatttacatataactagtccctgcaggtgctcaccaatagtcttgaaatgggtcgagaaacccctcccaagccgacgatttcataggtccgaatgggtcaaagtgcgtaagatcgactccattcccgcgtgtcaaaccaacgaaagggctaccgcggactcagttgggctccaccgggcgtttaaacggctggctttcccgcgtgagagggcacgaggggttagcatgcattgggctttggttgtacagggtcaagggccgatattccactcatttccgagcttgccgtatagaagatcgatttagacttggatgtccaatattgcagaggatccccccataatgtacttaaagggatgcatgtatttataacactgcgtcattctggaacccacacggagtggatatcccttctcccccacaggtcaactgccaatttccaaaataaatctagacttcgtgtgaccagagactttttaacgagattgtttacaccctggggaccaaggtaccaggtacccgtgcaactatagaaccaagcccgaagagaagatgtatagaaggtgtatagaacagatcatcgcaggcaaatataaaagaaaaaaaaaagcaaatgccaagtcacttgtttttcaggtaaaaaaacaaaaacaaggccctttttctgagttccctttggccctttgggctcgtattttcttttttttctgcctttctcaattttcatttcatttcatttcctttctccttcctctttctctttctctctctttccctctcgttgaacactcaacttctttcctttcccccttcataccccccatggcgcctgtggcatcgcactgactcccagtcattttactcgactctcctttccaccccccatgagtttagttagactgtcgcgccaccgaaccgataacgataactaatcccacttgtccctgggcaagtgcccccaaagtgccatggcgatatggccctttaatcgcaagagcaagcggcacaccatccaagtgaccggtgccgaagctgctgaccttcgctccgcctttgctgatccgatgatggagcctaccctgggccgcaaaccatccaaacgccatagcaaccgcacgacacggacggatgctgcagacagccggcgcagctcggccctcgtgccgtcgaatcgacctatctcatcgttagaccgccctgcttccattgccgatcatccacggaacgcgccacgcgaccctgcgatctcgagaacagcttcgctgctgaggcggaagccaagccaaaatgcaaatgcaaatgtcccgaataagctacgacggaagctgagcaagcggaaggcaaatgagatcatgcgcgagcgtgagattcgtatgctctcgtcgacccctcccatcgatattccccatcgtccgactcttagcagcggggaccatgtactggaaagtcgccgccgaaaggcaaatggtagacgtgccgaccggtacatgtctgacatcagcctcagcatccgtgactccgcctcctctaggtctgacatctctgacccatacacctataaggtcaacgcttttgctgccctgactccacgccctgttgttcgttacgtcgaagcccctcgcctccaacccgacagaagtaccaacccgtctgcttccagccgacatgacaaagagaggctccaggccctgaacatgtccgaggaagatttctactattccaaacgacgagtaaatgaactcgctgattcattagatgctggggctttgagagaattgcttgaccgggaccgtcgccgccgggagaagaagcaggtcgtcgaccaggaaagacttcgacgtaagctgcaggagagggctgatgctcagcaagcggaggaacgaagactccaggccgctgttgaggccgctaccgaggccgaaattgctcatcccgagcctttcgtcgctgaggtcactgaacccgaggacgttctcccgaacgaggaaaccaccgcccctcaagttgataaaccgacggtcatcgcaccggagaatgaatcgtggctgctgggggcttccaagagcagtgagcacaccggacgcgaatcgcgggaaagttctcgcgtagttgacgatagttctattcgtgaacggagattggttcagcgtcctagtttcgccatgtcacatgacatcaccatgtcccgaactactctttccccatctcattcatcaattcgccatgggctcaattccccgagccattcacaagtcggtggacccggctccacatcggacgtctcaaggggggttgattcagaacgtcgactttccgacaccagcggccgccgggggaataccattacttcgctgttcagacgtggttcttctcgtctcaagcggacatacaaggagcgattccacgacactacccctgaagtttccaacgcctcgcatgaatctttctacaagattcagacccaatcatcccctcctcagccctcggtcatccctccgagaattctaatgcccactggaaccgtgaagcgctctcaatccaagttcactgaacacttcggcgatgaaccactgtcgcctcctgactcgcgcctacagtcgccagatatcccggaggaagtgctagagtcctctctcgagaatgacgcgacttttctgcgtgaaccaagccctagtcccggtgtggacattaaaaacccgaaccgaagtcatcatcggtcgtgggcttcagatagtatggacctcgaggccgataatgtgccactttcccaatctctagcttcaattgactccgagggatcttggatgtcaggccagtttttccgtcgcatgtcacaaaagcccagcagtcctgttcgatccaatttgacctcatttggccgagactcggtagaggtcccggcagatgcttccgaagaagttgaatcactggatgagtcccaccgtcttagcacaaatatccttcgcgatccagagttcgaaccggaagcctctgacagtccggcaaacattgtcgctgaaaaatggcacagtgaggtcggccgccgccctgttctagtgaacccagtggtccgtcccaagtctacacaaggactgctcagagggttctcttcattgacccccatctctgcagaggaagattacattgtggaagagacaactccttccgggttgcagcggattcccagcgaggaactcaggattggttatgccgaatagactgagtattagtgatcaccatcgccatttaacagcaggatctaccatttatcattacatcatctgtgtcttgtgtcatggcgtgttagacgggtaccactatgcccatcgactattgccatgactcagatgcagtctgccagaggtcgtttgaaccttccctttgtacgctcttttgtcactttcctttgtcaaaatatccatccgtgagccttggattcatcctctggccatctgtacgattctgatatccccatcgccttgtatccatttattgcccttgcgagttcgtcattctcattcgatttgttgatacccctcgtcgccccgtgttttatctttaccatatgcataaattcttattccttcctattctttctgtcgaatacataagctgataaatctttattccccctcaagcgcttttcttcgttgcacatagttggccgcttctggcccttttctttcatcgctgatattccgacattcttttgggaatctactgatttgaggatcaagcagtgtttcttatgttgatgaaaatggtattctcgaggttttccttatgtatttctatcacggtccacaggcctttgtccatgagaagaataggattgagcctattttggtctatagcgcccttgaagtctctttaattctcatttttcaggaataaaatatatgagttatgtctctccgttctttttgggtcccagtaagcaacatcacctaagaaccgacaacctgcttcgcgtgggtatgtaggtataatttttgtagttgtgcatatgcagtgtgtaattagttgcaggcccggaaatgctgacagttccagactccatcttattcgtaagcagctcgaggtcaggagcacgtcatcccctatcagcttcacttctcttggatcccagcggcatcgatatctgcaggtacaagagaatacaacgaaaagtactgacaaatcccactatggtaagtctcaattgggatcttctcaacccttgaatcatcccagtcaaccccccagcaagctccagagacttccggacctccaggacccccggggccagctccgatttattattcagcgcggccttacctaatcgcctctgctgggaacgtcatggccctataaaaacccagcgcccctcattctacccctccaatcgaaatacttatatccactccagttcaagccttcatctcttcgttctacccccagaaccatctccggactttcttcgctactgaatcgatcgattcccgtccagcgcaccgctttccgacccttctcttcaacacctatcccacgcttcacgccttcttctctcaaaatgggtgtcactgctatcaccacgtaagtgcccagcttgactctcatacatacccgtggatcctggaaatatgttctacgcattcatcctggtcctttccatttcgcaaagtatgaaaacaccctagttaacactcctccttcttctccagtgccgaggagtacaagaccaaggtcactgatgccaccggcctcgttgtcgtcgacttccacgccacctggtgcggtccctgcaaggccatcgctcctaccctcgagaagctcagcgatgcccacaccaacgtcaagttctacaaggtcgacgtcgatgacctcgccgaggttgctgctgccaacgctgtctctgccatgcctaccttccgcttctacaagaatggtgaactcaatcaggaggtcaagggtgctaacccctccgccatccaggctggcctcaaggctatccttgcatagtttcggaaattgagattcattcttgttcatatcattgatctatgatcttttttttttttggagggttgggtgaattaattgaatcctgaatacgtaccgttccacaaaagtctgtgtctatgatgtaggctattcgtttgctttttcttctcaatcggttgtttgactttgcttggaagctaggtcggctatgcactgtgctttacatggtaaatatatgtacgtaattgaagaaaagagctacctggaacttgacttttgaattagaaaaaagaaagtgtctgtcctacagcttgcatgcagcttgcatgcagcttgacaatcaacccgcagtgaaattccccgcagtttctctatataacatcattggtgtttatatatgctgatcacttgagtccgaccacggtagcgtttcctccatttccatttcaatatcaaagtctgattggttccagattttgacatttatagatatatttaagacaaaaatagcaggctgcttatactgcattgtcctatttacttgttttgtttttgtggttctcaagttttataggtagacggtagaaaaagccggaaaaatgcataaattatgcaaacagaatttctgtgtacccaaatagcgtaagtcaaatgaatgtggatttgggattccggaacatccatctctgtactccgtaaatgagtgaggatatactaggtgtataacaagtttacaaatatgacaaacagctatagaaaaatggtcagtgtgtgaaagaaaaaccaagtttgaacttgaactgcatggcgcagatgcaaacaaccgagagaaggagttgtatctgtaggataggacgacaaacaattcaatggctgtctatataaagagtggttgtagcttttccatcatctccctttccatcatccatgtccatccacctcctgcttccttcaagccatgtcatcaaagtcttcaagtacggcgaccatggtcagtgagatgagtgacgaagatgagcgcccctcggaggcgtttgaatcggagaacttgtcataccgcaattactacccctcagaacatgatcagaccttcaatactattcaagagtatgcttcttcagtcatcaatttctgcgcatcgtcctcacgaccgatggacctcacattcacctccagggttgcgaagcaccttcagagaaactcggatttgtttgtgatgattgagtactacgatgaatgcgaccctctcggtactcttttcttagagtcatctcatcgagatatggcccaccatcgatgcgccaagctgggaatcggcatgctgaaggagttccagcattacgaaattgaggcaatccagtgggctttgaactgggctttcaacagagccggcctacatcgggtggagatgaatattccatcgtggaatatgcgactgggcaaggtgtgcgatgaggttgggtttcagatagagggaaaaaggcgggaatgttttttcaaggatggcgagtggcatgacgaagtgaacatgtccatgttgaagaaggactgggtgcaactccgggcctagacgaagaggtcgccatactgaaagtgcggtggtacaatggatacaatgcaggatgccttctatgattcaatgacaagtctgacctcgattcaattttgacttttctcatcaagtaatttcagtaagagtaagcgagagatagtttaaagagagaacgttgaagagacagaactgatgtataccaaatcctgcataggcggcttaacgtctagctatccccgaagccactataaagtcactgtgcacaaccacgacagtttctattacctatcatatttatgcatcatagccacgcgattgacaactgacagcaaccgttcgtgacttcggtccatttgcctcgatggagaatagtagatccatcacacccactgagcatgtctggagtaccaaggttgccatttagaacctatccactacatataagaaagcgggcaaagaggcgttcgacagtcaaagagtgtccaaccgagccgacgcggaaagcagatcgatcagatatttttggctgtgtttgcataaacctgctttgaccttggttcctatgattcatcgagggaaacggaaagaaagatacgccttcaatccgggaattaatttactttgtatatgcacatcttcaggaaggtgggactgcaggcccactctttttttaatctccttttgatctcttttcctgttcggatttcgccgaggcaaattttcttgtgttttaattggctgctagtcctgctatgatgcctttcatacaatatactttgaatttgcaagccgtgcgatccaggggcacatccgatcgccggcttgctcttattttgcttctggtttgagggttctcggtggcgttcccattgtccaaggaggctaatgtgatcgatcaatatctttaatatgttccgacgaacggtcgactatgtacggagtaccgaccgagcctggagtatgtatatcacaatatttaagagaggtccaaatgaacatcacagtgggccccgctcttctcacatctggcagctgaggtgcagctgaattcgcttattagctcggtccacggttccaacaattaatctaaatggaagctcaaaccgcagtgcctgggtaattctacggagcagtaaatctagtttccatggttgatacaaccccattatcggagttatatcaaacccaggcacggaaaagacatcctgtagataaataaagactaagatccgatgccattggcgttgtattagggctccgatacgctctgaagccaccccacatagctctttatccatacagatccgatctagatctgcccaaagcgaatcaacacgggaccaaggcatcggctgcaataccacatccaccaaatctaaagcgggctttgcgaccttgggatctaatttattagcatgaacttattctactaaaatcaggcctcggcattccctttctggattttttgctttgttttggtgtatgccacgcgagttgtgggtttaggataggtttaggatattacttgcaggccaatgaccctgtcggtggagatcacgtctagatcggacggggctcgatcgtggtacacgtcagttcatttgttaccgtggactagaggggcgcttgggatggctagtctaccctggtctaccctgatgttataagatgtttacctcgagccctgttctactgatttggactttgtgttatttgataacttttgttttgctctccacactgatactaggaagcgatttccatgtcgtcttgttgatattgattaatacagtcgcttccgactatcttaccctaccctccaactatacgtgctacttgccaatgtgccaataacgaaagaccaacacttattctctttctttcacaatgtcgacgacagacgataaaccggtcgtgcttgtcacgtacctggcggggtacatagttctttcctatgtgatcagcgcaatgggatgtgcaaccacactggagctgctccaccggcggacatcgaggtccggtctgtacaattggtatgcccaaaaactctaccctaccaactcctgcacttgaacatgtaactaaccaaggaaaattaaaaggtaccttctcctaacctcgtcgatcacaatgggtggtattggaatttggtgtatgcacttcatcggcaaccgcgctatcgtcctgggcgacggccaggcagacgtgcaagtcttatataacgtggcttttacgggtacctcattcgtgctccccgtggtagtactgctatttgcattctacgctgtgggcgtcgaagagaaggccggctatcttcgcatcctcatcggaggcttgctcactggtagctctgtctgcggtatgcactacatcggtcaactcggaatctcgaactatagatgctcctatcacgtcgccaatgtcgtgggctcggcgatcattgctattttctccagtactgctgccctaggcatcttcttccgctggagggctacctggactgatagctggtggagacgaggaatctgtgcttgcttattggcggttgccgtctctggcatgcattggaccgcggccgttggaactgtctacaaggaccacaaccgcatggtcatgaagggaacccagttgtcgaggagtcaggttgtcattgtctgcactgttctggtatgcttgcgattgctttgaagatatgggggattggaaactgacagctctctaggcctgtgttgcatgtgtagtgttgtcgatgtgcgctgttatcgctgggcgaaatcgcagaaagtcgacgactcgtgcccatcagctggtccttgcctgtgcctactttgatcccactggacgaatcatggtcacaacgcaggctctgcttcctacgagaaagattgttgatcattatatcggacgggtatgtccctgagccaccggatacagcagaagtcttgactaacgaattacgaactagacattcaaagatgacgacctcacccggactcaccctacgttcctgtgggcatttagggcaactcgaaattggcccgttgtgaaagatctagtacccttcatgcgaaaccgccttgattccgaagaaagtgccattgagaaacacatgctatcgcgcggagtgtttatggacaaggatacggagttgcaaactgattttgataccttgttcaagcaactcttctgtgtcacagcccaagagctctcggatgaactgaatctgcctctccaggacctaggaacactctacgacgatgttctctctactgctatccccgtctcccgactttctcgagccatgggccgctcttcgctccgcactggcaagggccaattgatgttcactgttcgccagctacaaaaacatgaagcagcacgcttgaggtcacagggattccgattcgcaaccatcgagcatatcaccggaatgctttcccgacgcatccatgttcccgaagcaaacctagccaactccctccgcgatatgcgagactacgcaagctcgaatcgtggctttgacgagggagtacacctcatatccttcatgatgcgcccaacaatccacgatcacttcgagatcctcaccgcaaagggtgtcggcaaccccctcccatccgcaaccctccccataaaacacctcgaaatccaccatctagaactcatatcccacatggaaggctggtccatggacacatgcatgcgatacctccagtcagccagcgcagggcaagccttccccaacctggacgacttccgcgccgagttcatccaggccatcatttctctctcgaaaaccatcccagaagacctgcgcgcagcagcgcaactttccactcgcccattatcagccccctgccgcagcagatcccccaaccccgaaatagccgtacagaaaacctgcaccctcataaccttctgcgtcgtcggcacgctcgaaactcaagtctccaacccagactacaccttcacccccttccgtctcttccgcgtccagcaacagataaacgaagccctcaccgaccgtgacgatttcgcccgcgaactaggcgacgaactcttctgcacagacgtgcgctcgggatcgaccaccagcgagagcccttccacggctaaactggccatcttgcgtctgtggccgtcacgcaagcgctcggcgaccttgagctcgcaatactcccaggagtcgtttgcggatcctactgcgactgcgttgcgggatatcactgttcgcagggaggttcgcgttgattttacccacctccatgagaaatcaaatcataatgtcagtgcccgggaaacaaaggtggttgttaccggtggtggtgagaatgcgcctacgacttatgtcgatgagttgtatagtctttgctatgcaccgggtatccggatgagacctgatgcgtcgttgcaaaatatttcgcgtggatcgactgcatgctgatgacttttctttatggtttgatttcttttgcgttatggctggcgtgagttggaatgtatacgggaattgggactggtcttttatgatttgttatgtctatgcttttcgtgggatggtttaggattgtatataattttctctttctgacgagtatatagatgatatcaatacaaacgcatgcatgtttcatgtgtaatttcagcttttccaaagtcttattatcaataaacagccaaaatagtatttgtcaacacatgagatgaactctagtaggtcacagagaaaaagcagaatatcgtcacacatcaagaatagactcgttaaccaatacatgcaagagatgtcatgtactcattacttcgcacctgccgagagcgagtcaggaacaaatgcagtctgaaaagaagcactggccaatcaattgaagatcctccaatccaatgcccatacactatagagcacagatcccacggatcaggcatcaattagcattaggatcctcgcgctccaagaacgaaggatctgcctcaatgcggcgctcgaacttcgcccaccaattctggaagctcttcagcggcacgacatcctgaccattttcattctccgcaaagctagcgaggaaattaaacgcgttcccaataatgcgctgcgccagcagcttcgtcgagatctgcttctgcgccggagattgcgaaaccaacgccatagacgttctacccgatgggcgctccgattccagggaggcaagctgcggcgcgatattctgcgcttcttcgatcgaaatgcccagtgtcatgacgcccgttacagcagtgtcctcgtcgagcatgtcatcttcttcctcggcttccgagcggcggggagcacgaccttgtggacgcacggtgaagatgcctgagggcttttcgtttgccaatgcgcccacgaagcggaagtcggagggttcgccggtggtcgggtctgggagttgggcgtagattgcggcgccggtgtttggtgggagggttgctcctggtagcataaagacaactatgtcgctgagagatgcactgattgggattgtgaaggcaaatttggttgcttgcccgttcaaatggctgtctactgcaatgatgtctgttagacacgggcggcctgggaccacgacggagaacatgatgtgtggtggtagggtttggacgagctggaggcagcttgagtagctggtaaagcggaaattggcaaggtgaactgcgatcaatattacttccgttcttgaagcttctttaagcttctcgatgatgaaatgacataagaggggctgcccttatcggccggtcgataagggtttggcttggctaaacaaaggtctggttctcagtatatcgaccttcgacttttactttgccatcgggttcagcttctgtctttagaagtcattatgggcaaatccaatttagacctggtcggcgaatgcgataagtaaagctgtcccaactcggtttctctcaattcgcgttttctcttacaccccaccccgcagcttcccctactacgaggatgatcgcgacgtctacacggagaacctgaagaactatcatgcattcaaagtctccggatacgactgtacactcggttacattctcaatgcagtcgttgagaaatttccctggtcggaaaagagctgggccattgactcgactgcgcagaccgtgacgctagtgacaccggagggaaccaccccggcacaccggagcaagctcgtcgcagcagacatagccgaagccgtgaaacaaaaaaagttcgaagtgctgcaaggctggcgcaacgagacctacgcagtctacggcccgggcggagaattcctactcgagatggagcgcgctgcgaccccactcttcggcatcgtatcctacggcgcccatcttacgggctacgttcaggatgaatccggtatcaagatctgggtcccacgccgcgcaaagaacaagcagacctacccaagcctccttgataacaccgtcgccggcggtatgtgcaccggcgagacgccgtttgagtgtatagtccgcgaagctatggaagaggcatccttgcccgagtcggtggtgcgcgctgcgactgtctccgtgggctgtgttacgtactcacatgtacgggatgtacgagcgggcggcgagacgggcctcattcagcctgagattgaatatgtatacgagctcaggcttgaccctgaaactaccccgaaacctggggataatgaggtcgaggaattcaagttgttgtcgattccggaggtgcaggcggctttggcgcgcggcgagttcaagcccaattgtgctaatatcatgattgatttctttgtgaggcatgggctgctgacgccagagaatgagccggatttcttgcagattgttgctagattgcatcgtcgcttagaatacccgactgcttcgcattgcgcaaggtagattatttgtttgattgcttgagacatgtgtcagataaggcgaactaagatatatcaaatcaatttcaatcgtgtgggttccttccgcatttgcacagccaaggcagttatttgcaagactatgaaatgattcgatagaagcatggtcacaaccgcactgacatcgactgttgtaagacgaagaagatgaaaatgagccgccaaagtcagatctgttgggtttttgagtcctgatcgcaaagccaggaaagggataggcactgtgcggctgccagaaattacagctctatgcagactcagcccgccaggagacgcattttcattatcgaacggtcaatgttcatctcgtcgatcccatgaaaatcatgattgttatgataatctattggtattcccaaatcaaaatgcaaagaacgcctgcgctgcaccccataagaacgatatgaacatcggtccggcttaaatacaccgacttttcccccattcgggctttgcctcaagatcaatccaagatccatctcatcctatgccaaggtcgtaagcaaaaaaagagagttccaacaatcgtaagcttatttcttaagcagcaagtacacgtgatcgattctcaacggagcaagctttttgtaaggtccttccaggtagagcagaagacctccaaaggacacaaagacagccctagaaatgtagacgttagtttccgcaagagccaacacaccagtaacgaaactcacatggtatccttagtggcaccctcctcgaagcggtacaccttgccgtggcaaacataatcgtagtcatccgctagggtctgatcacccatgctgacctccctccagctggcgcgggtgtcctccttgccgtcaagagagagagtcgaggccagagcgagggacagcgactcgccgaccgcgcatgggtacaactcagtgttcacatccagggtaaaggtgagggaagcatcgttcgagttgcaggtaagacgggagacgcggtcatacttctgggcgttgatcgaggtgatcgtgaaggtgtcttcgaagaggagcgggtcggacatgatgaaggttgcgaccgctgtgttttcggtctatggatggggtttttggtagagcgggttatgcgcagattatcgcacacaaattatcgtaggttcaaaaggccacaatggctagttggtggtccaagagtggtgaagagaagagttggagtcggagatggagaggttgatcggagaattgaagctttttttttctgccgccatttggtcccgccgataacgatttcgttggtttgacatcagctcgttatagctctactagatttcttccctagattgaacttatccgccatgtcctttcgcaagcgaaacattagtctttctcctggagttgaccgcaacgctgttcccaatgctactgcacaccccgctgcgccagttagcacgccaggcattcgcccctcccccgatgatggacggccaacaacatcgacagggactcgctctctagataatcttcttgcaggccatgcagggcttccaatggggaaaattttgttggttgaagaaaacggaactacggattttgcgggcgcattgctgcgttactatgcagctgagggcgtaatccaagagcagaaggttcatgtgattggagtgccagaacaatggggccgaagcttgcctggtctgatcggctcggtggagtccctggacgagaagagatccgacaggcgcaaggatgatcgtatgaaaattgcatggcgatacgagcgattgggcgagtttggagcagtcgctggttcgcgggatggtgagtattggaacaaaacattgcttctagcttcaatatgctgatcaatatagcccctaataatcacggggaacaagatgcagcagcaaaagaagcacccgctttctgtcatgccttcgatctcacgaaacgtctcacccatccgtctatcacaaacatgtccttcatcccacttatgccctcaagagagtcaccattcctcgctatccttaaacgactccagaccgaaatcacgtccagcgcgaatacaatccaccgtatcgtcattccttctctgctcaaccccacaatttacccgccgaacgcctgccaacccgaacatgtactccagttcttccacgccctaaaggcgctgatgagtgcgcacggcacccgcgtgaccgcaatgatcaccatgcctctgtctctctacccccgctcatccgggctggttcgctggatcgaactactcagcgatggcgtcattgagctctgtcccttcccgcactctgcggatgccatggctacctcgggagcggcgacctcacaagaagagccaccgcagggtatgcttaagacacatcgtcttccagtattgcatgagcgtgggggtggaagtgaccagaatgttggacaggattgggcgtttattctgagccgccggcgattcgagattaaaccgttcagtctgccaccggcggaaggagacacagaagcgcaagatgcgtcggctccaggcggaatgcccaagaaatctgatctcgaattctgagactctttatgattggtgtgattccctagactcaatcgtcctcctcgaagcgtcgttgggtccctggttctgctagcatatcgtccatctcgatctgctcggacatagcaggaccagagttggccattgtgcggagatagctcgctccatatccgtccaatactggtcgcacggaacggaggcgattccccaagcaggatgaagctgcaagccatgctgttcgtgttagtaatgcgatcgggagtaagaaaggatgctgcgcgatactgaccaacaaagagtatcaaaggtgcaaagaataccaggaatatcagcagtaaaaaacccatgatgccttagtatagaacaaaatactcaacgaatgccaatgaagatgatgataaacacgacagcgatgctcagcagttcgcttgccaagatgactattcctaaagtggactagtgtgtaaactgggcttttccttttctttttttttttgggcgttcgtttcttctctccttcaatcaaccctggctttgctggtcaaacccaaagacaactccgggagtttgatcatgttctcgacactttgttaattctctaatggtaagcttcatcctcgtctctcccacacccccaactcgcatgattatttaactacaatctgtcaatcccctgaagctctttgatacgtcactgagtgcttgctgagaaacgtactggaaaatgaatcgcgataccccaatttaccttgctggcaacctgtatctttacatattggacaagcgctaactgtccttgccacagaatcattgaaaatttttccacaaatctcaaatcagaaagaaaaaaatatggatttccaaccagaccttcctatcccgatctcctatgtatccggtagatacctgttgttctcaattgacgccgtgacatacctgcgacgtgagcatcacatatgcggtgtgctcattgggacgctgcctcagatccctcagcagaatgtcttcctgggtctccctctgcagctgatgccagaagaggcacggctcttagtggataagggtgtagcttgcatcgtagacgaagccaaggcacacgacggcatgaacaccctcttagaagaggatcgcagacggtacctccgcgacctcgaatctcaaggccagcatatctcgcgcatccaattggatcgcaaagagcgcaaccgggagcagacattgaaaaaattagaagaaaagaaagcaaaggcgaaggctaaagccagtgctgctgccgcccagacacctacggttcctgaggtcacttccaccccgtcgccgaagaacgctgctatcgttgacctcttcaacgcagaggatcgcccatcgtctccatcgaccgcctcgacgagcacacttcctcagagcgcaacggtcattaccccggcaacatcttacccgccccttctcacgcctccaccatcgagccatcttccagcacccgcggtgccaccctcctatcctctcttcgcccacctccactccaaaggatactttctctcccccggcctgcgcttcgggtgccagtacacggcttacccgggtgatccgttgcgcttccactcgcacttcctcgtggtgtcctacgactgggaccaacatattgatctgatggatctcgttgtcggcggcagattggggactggtgtgaagaagggcttcttgatcggcggagcacagaaaggaatcgatgaggtggattcggaggctgatcgtgtgggtactgtgcgggctttcagtcttgaatgggctggaatgtgagggatgaaggacgtgaagggtttcatacccttcatttgtttttatttcccatctaccaggcttgtgggtttggtttttccttgcaaggattccatggctcatgcgccacgctgccgggtcgtccttgcctgtccccgggtacctggaaccaggtgcccgaatttctactgtacctggtctcattgagcccagggaagaaatacgtctattggcgatttggaccatcaccgagcataaagatacagatggtatcctcactccaaaggaggtctaccatgactccgccttctagcgactcaggtcggaggcttggaaaggcaaacagtacgtggttaagaagggtcgtcaagtctctggtcaaaccatacgttgcccgactcaaattagcatgtcatatgatcacgatcacaaaaaaatgttcatcgaatgacgtctacactttacagtgattttctggtaaatctgtagtatcatgtcacagttatgaatgatatgcttcgcctgttgaagacaactagccaacccatcggggataaagggtattccaccatgaccaaaatcattccaattgaccgtcttttcgggtcacttcatagattcgagctgaaacctcgtgttcggtgctctttcctttgtctgaattatgtatgcctttccgcgtttgggtgccacattgcgcactgtaatatcatgcagtagacatgatgaaagaagaacgagtctaacttcatagaacaccggcatgcctcctcagattatgactgtgaagctcgaatctcaaagactctcagcagtatcagcttttatggcaggagcgcacctgcgccgctcgagtccgcttcacagctaagcagtcaattctgtcggtagtaaattgggaagaaccgtagaatggccaccgtctcaaatgtaatcgatgttcctccacttgaatttcttattggctctgtccacaggacgattctcgaactggtttccatgcagctcgaaaaccaacggcataggagcttttacatcagactgagtctgctgatccttcgcgccctcggacggcgttggcacaggcactgtgaaccggaagatagtgtgctccttcggtatagctgtagaaacaaaacaaagtcagcatgatcccagtatcgcacctcccactccaaaaatcaaactcactcttcatctcgtccttctcggtaacaatgacgaacgtaaatttcgtatcccgcaccacaatccccttggcaccaaccctcccagtacatcgactcctgacaacctcgaccgcagccccatggtaatccgcactgacaagcttgcttccatgcgacgccggcgaaacatgaccatgtggtccagccttcacatccaggatctcctgcatatacccgacccacagctcatgtaggcccttgaagatggcgtatttgcattcttccttgggtaggttgtacagtcctgacttgcgcttttcgcgcgctgacagcggttgtggcttctggtgtcggagaaagtattctttcttgcgtagacgctcgagacgacgccgggagcggttatcggatgctgagggggaggttgcgcggaggaagagtggtttctgtttgatgcgctcggtgaattgttgcgttgcgctgtctggggagtgggcgcgtgagagaagggtgtgcgcgatgtgggtcttgggggctggggaagaagccattttgtgttatcttggatgtgtggctccaggggatgcgaaggtgtggttgttggaggttggagaaaaattatttgatgtcacacaccgataagataacgcaggtcatgtatagttcgaaggtatggaaggtataaacaaccactttattcacattattagaatgattcaagtctattttctataagattatcctcggatattggaatatttcagtgattaggtttcggacgtccctcggctcattgatgcttccccgcataaatcatctttgaggtgatatatatctcacgcattaaaatgacacaatacctgcaacaacctattgagataattattgtctaatattgactccttcaaatctgcttacatcaacatgcagtctcagatcgatcaaaaggacatccccagcaacttcccggggattccagccttcccagatgacgtctctacagcaccccttcttcgactatcgtcgggaaagctgttagcaggtgaccatactgagcaagagagactgtttcaagcatctacagacattgggttcttttatctcgatttatcagactcaaagagaggcttatcactcctcggcgatgcagacaatctgttccaagttggcaagagactatttgagctgagtctcgaggagaaaaaacagtatgatttcagcgcacagaattcttactttggttacaaagcgcagggagctatggtggttgacaagcaggggaatccggaccggaacgagttctacaatgtacgtcagcaccgaacacacccacctggacgttcacggtagctgacacaactatccataggtttccaaagacgatattttgggagtcagtgatccgctacccgctccagagaccctgcataaaagccgagctcgattggaatcattcatgcaaggctcacatgcaatcgtaaccctaattctggacatcctgaacgataaacttgccctaccaaagaacacactatccaatatgcaccgactgcgaactgtaagcggtgaccaggtccgatttatcaaagcccctccacagccattagacgacagacgtaccgcgctaggccagcataccgactttggaagcgtgacggtgcttttcaaccgactgggaggactacaagtgctaccgcccggtgccgatgccgaatgggtttatgtcagaccgcttcctggtcatgctattgtcaacctcggggatgcaatggtcaagtttacgaatgggctgtttcggtctaacattcaccgggtcgtggcgccaccggggctccaggctgagtcgacgcggtacagtctcgtgtactttgcacgtcccgaggatagtgtgatgttgcgtcggttggaggaatctgatcggattcctgttatggaggatggtcagactgaagaggtgatcaatagcaaggactggattattcggcgggctctgggtcgtcgggtggaccgtgttgatgatcttgactatgagaagtctgcagggacggagcagctgagtcggaggatcaaggcttagcattgttctaggttgttttgagaatagtgtgaagcttgaaatagattacgctttgcaagtaatacgtcaatctcggcacttgaaaaaaggggatagccatgtgatgtatagccatgggagagagccagtctaatcattcgatggtcttacaactatacgaaaacggcgaggcctatgacttcgccctcacgttttctcaatcgggaaggtacactatcgtgagtattgtttccccttgaaaatatgtaacacccctgaaattcatcaatcgtacccgtggacgtcaatatatattaccgataaaaaaaagcttaaacgataggtctgaccaggggcaaagccgaatccaccaagcccaagagatactacggagcatactacactactttaggaaggagattctactctaaatcagccttctgagctatgaagacaaagtttaagtagattaaggaaaatatacccttcgaacgggcggttagaatctcaccaagacttgacagctccgattcttgaatccgacactttggtaaagataatccagttcggtggggagaatctagattccgaaaacccttcgtgtctcagcgatacgtgcattggtagaaacaaaagcgtatggagtattccgtatccctcttcgatatcagctgatgtgcaatgcgacacattataccccgtatattattctagaatacgatagttatacgatgtactccgtaccccgtagtgcaatccaacatgggcattgacgtgtcaggatctagatgtagtaaatgatctaaccccattgaattggctacatattgacataaggctggcactcggcaaacctgcactctccgacatgacagcctgttctcatatctgtcgatcacaggacctcacatttaatcgctcatatacgaagtacccggaacagcagtgatgcagtgacagcgggtcaatatttttttttgcctcgcgtctcgaccagctggcgctttttcagctacggagtagagcacagaagaccaaaatagcttcttgattgagttagttgaccgttaagatggatccccggccacactacgaatcacattgtgagcgaaaaaaagggcccccgctcaatttccggcgctctggacctgggttgtccacccttactccgaaccgcccactttagttaccccctgacttgttagctttgtcctctgtgcatattaggtactccgtacttttgactagaccctcagtacggagtaaagtacggagtacggagtagacggtgtccagacctcgggatttgataaaataaacgacccaacaatctggatattctgcaataatgcgttatgacagcgggtgacccttccgtctccgggctttcgggtttatgccctgtcgaatccttccctgcagtagtctacatatgttgtactcggctactggtaattacaaacgagggatctctagaactagacaggcataggtaagataggtgacaggggtatggtacttttgttaaggaaaaagcaaaaacatattgtatagatcttgaaccgagccatttaaagatgtctgaatgagcaagcttctccgtgtccttaaacgacatcaattaaaacacgatccaccaacattcctcgagaccacaacaggaaatccaccgaactcaaagccccagaaatcgggagagaaagggctatgggtgacttctccgcgccaataactaatgccctatacgccgtcgtcttcgacccaccgcacggagtactccgtacattattacggcctgactccgttctaaattattgatattttacaaccatacatcgcacggagtaccagctatgtggtaatctccgtcaaagctatgcaccctcaactggatccattgtttcaatataaaaataataaaaaggctcggaccgttcgaacggaaccacacgggctgtgttgcccatctgcccatctacccaccctgcccaagtccccaaatcttactgtaccgaggtttcatggtacgatgtatgttgtcctcggccgaaagcgcccttccatctgaggtgcgtctacggaagagttccggtttgtgctcagcttctgtggcgtcgtggcacccacatcatttgacaagaccccgtaaagatcggggaaatatgcctctagaatggatttggaatcatccaaatgggcgccagataaacggtagaaggcagaaagacacgatgtacgatgtacgatgtactaaacgaggcaattacacatgcatatccccactgtgtggcatgacgtaggaaattactaatgtggaccagtccggtgaattaggaataaacgccgttgggagatgcgggtcggttggtgcagcggtcctctttgggggctttctgtacttaagctattgcgtctggctatccgaggaaatggaaactgggtctgtagtctggtttagtccctgttggggattcccgccgagtttcatgttccgacatgcgcaaatcaagccatacgtttatatgcttacaacgtactccgtagtggatgatggtgtgttgtatacgatatgcacgtccgcccccggccgtcatggaaatgtacacatcatcgggattcgtacgggtgcgcacgcgcaggcatgtgtagtagaacgaggcgttgggaattccctggagctgatctcgattggagatatagtcggtttgaatgtatagaagttaatgccatactatatatgtatgttatatggcatataaaaataagcatgctatcgggatgaatcgagttgaaagcagtacgaataacgcaagagaaaccagtggcagatatcataaaggattgtaatggtcggttgtaaagagaaatcgagtagacagcgtcgtatgttccaagctcaagctgccgattcagcaacgtctggtgttcgttcaagcgccatagctgctagcttctcttcaagacttttgagaacctccgggcttgtttctggtttcacccttttaggtctgaaagaaagaaattgaatgttagcaagaaaatcctataccacatgttgtagggttgagacacgtacggaattcgtatagtttcatcacacttcgcctgaccacaattcaaacatgtttttgcattaccctggaaccaagtctcacaaacatgacactgataatggactctgcgacgaggcttcttgaacgtgcgctcgggtctaggcttgggcggatcagcatcgcccggatatccatcgggatatttatcgagtttggccgggtctcgcgggcatatcttgcagcgcacatggctgcaactcgggcattccttggtgccgggggtaaagagcgaggcgcagaggtgacagttccgacggacccgctggcgcaccggccgacggacgaaatccggaccgccggtgggcgacggcatcttgagcgaaatttcccgggtggtgctgagcttgaggtgcgtggtcctggggaacagatggggtgaatgggcgtatgtctccgggttcttggacttgcgggttgtcggctcgctatccttgctatccttgttgcgggcggatgggtgtcgggggcactttgtgcagcgggtgtgctggcagttgacgcatactttctctgcgccgaaggtggtttcgcagcggtggcaggtacggcgcactcgcatgcggattggcttcgttacacgggttagctggaggtcggggggtgcgttccagtcgctggtgtcgacggtcaggccatatttggcgaagaggctgcgcgccttttcctgttgagttctgctgtagctggtgaacatgaccggtcctgatgggctgggctcttgggctggtgccggtgccggtgctggtgttgctgctggtactgatgccggtgccggtgatgttgcctccggtgcactatatttagtcaagactagtcagcatagtgttgaagtagaataatgtcgtatatcgtacgtggtttcggcttgagtggctaccccaggagtgatagattgtcgtttggacattgaccgaggacggaggacggtcttcatacgcttaaggtatttcgaaaagccctcgggcttgtcttcagggcggtcatgttgagacatggttcaattgaagaaatggtgatatccagagtgtgggaactcattccatacgaaatatgtccagtgtgaaggatgtcagagtggactgatggtaagatccaaaagttggcagggaaaagtaggggcaacccaattattatagagaaggaatcaggaatcagactataatacaagagtattgtataacaattgtataaaaaaaggcccaaagctcagacgtggggattccgatactgtggttctgtggattcggatggtttgggatgctattgaatattcgatgttttattttatttcacttcctctgcttgaaaatgcatttaaaggctttattttatattttattgggtttttcttcgggttttcataggtacaaaggaggagtactatttctccggtcacaattggcagatacttaggcgaaggtgtttctccatactaaccactatagggaggtaccgaggaccaagtaccgatgaccaggtaagccctggtaactccgacgtctcctatttagtctctgatgtgcatccccactcttcctcctccaacccggtgccacttcgacgagaaaaggctttggtctcgaaactctgtggcttcaggagattatctccataagtcatatccgagaatagcgtgccatttcgctggtcttccggcacatcagacatggggccccctgtctcttggcacgccattggttcctctgctttcccgtcttggactggcctatcttcacactggttgacgtttatgtttcgtcaggctccgtacaaaagtacgtactccgtacaaagtacactcctgtcgccttccacggcggtcaaccgatggcgtggcatacaatagtattttggagccaaagggtgggccgggggaccgggaaggagtggtatctgtgctccagctggcctccctacggcagcacccgccatcccggctgcctttccagaaacagctaacttgctggtctatcagtggaagcggatcggggaagaaatagttgaggggcacacaggtgatgagcgtgccttcaatctcttcgttattgcggtcgatcaggaggtttgcgagaattgaattcctttcccttacaacgggaattgaactgccggggaggtgccgagcggatagagttttctctacacggtctttgtgtactttgtatagtaattgtacgatgtagttacatcgtacaacatacaacaatgcattgttactggttggagataaatactccgcacctagatactcggtatatgtaacccattgttctattgatctacaggtagtgctctttatagtgctgactggattattggtttctgggactgtgaagaagtctatgcagaatccagaagcccatgcagaatctctctagcatcgaagggtggcgaaagaaagaacctttgacacacgggcatatctccgacgattggatcagaagaggccatgcatgatgcatgacacggggatcccaaagggcaaagtaaaagtataaatacgagcagttcgtcgatttacgacgcactccgcgatgaaatccaatagcgatcaaataaaaaggaaaagtgctagatatgagggtatgcacgacgtcttcaaatgtaactcaactgttgatcacccctttttggaattttgaggcgattgtcctcagccatgtcatttttgaataccgcaatgaaaattattctacaacccaaggtgggaaacacgagattatactacaatatttttcctacaaaattagtagagccagccccctgggaaataaaagggcaaatgattaaggaaataatttcgcttagtgggcttgagggacgggtgagagtggaggtcggatggtcccagtgccctggtgctgtacggagtatagccgtaaagtacgtactggctaatcttccaagttggataagatattgatgctaatattacttgttatgtatgtagtctggatgccaattgaatagatacttggcaagactctacggtcgtataggatacttcttgtacttgtttatcccggtttctgcatggcctgtcccatgagtacggaagtatagacctgcacagttggcccgcatatgctgtgtgctgtatgctgtatagtataaactgtagcccagaatattagtctcatctgacacaagagcatacaagagtactccacactcaggtatgttaatgatgctctacaactttacattgggcctgtattcttctggcctatctggattctggataccttgccgccgccccccccccccccccccnnnnnnnnnnnnnnnnnnnnnnnnnnnnnnnnnnnnnnnnnnnnnnnnnnnnnnnnnnnnnnnnnnnnnnnnnnnnnnnnnnnnnnnnnnnnnnnnnnnnnnnnnnnnnnnnnnnnnnnnnnnnnnnnnnnnnnnnnnnnnnnnnnnnnttgatacccttcccccccccccccccccccccttcgcgtactgctacatagtacctacatatcactgttccaaatattgtgcattctttttcaaagtctttttagatgtcttactgggccccgagggaaacgcggatgacacgcccgcgttgccaccgccattccatttgccaaatcattgcggtcttttgtactatccttttactactggattgcgtgaactatatatgtatcgatatgaagatcactatatggcgctgaaattatcggagttgaagacaatagaagcaatgtatctgcaaacatcgtaaaatatcttgattttttcacgtgtagtagaccacatctcgacaagatatgaactcctagatcatacgagctgcacatacaacatacagcaaatccaccgaccaaattctagctaaacaagaaaagcagtttagtgaacagtggagagcaagcacatctcgtagtgggcgatcacatttggagggggaccaatcaaccacagccgtttatattgcatgtccacttcaatcggcatgttgcaagaaaatagggacaaaccgccaattgtatcaatcaaaagacccagaatccttttcaacggccacacacggcgggaccagcggagtcatacgagcgtatgaactagacagtcatcggctcctaaatctggtgagatcgaaaggcttttgcgctggatagctgggttgagtccctagtgagcactaggtcagccgggctttttatccgtggctggcggtgatcgatggcttagctggagaggggcagagccagctcccctgggcaggaggactgactattcgtgaatggatagtaatgacgaccaaaaccattacaagcgttcttttatcaagccataggccgtacagcgtcaattgacatataacatctgccggctgagccagataagaatcggcatgaccgaatgacaggccttggccattctaggaaacgcaacatagctatctgatatttgagagttcataactcgtgagatctaccactagcttggttatacgaactgtaccttgaaaatcatccggctgatagatcacaaacctcgttcttgggactatgcccctacatgatcgacgcgagcttgaaatcccggcaatcaggttggtctagcagccaattgcatatcagatttgaattccagaagtgtgtgcatttacaagccaataggatacagccaatccgcaaaaaaaccaaaaagcaaaacgccctttatacaaaacccacgccttgggtatatgctcaatccaccgaaggacatgctctccaatcaaaagacgatttgactagccgatgcggcttaatccgacccggtcagcttggacttgatgttgatgatatcttcatcggcctccacctcaatcactcggttgacttgggcactgctgcgcatcagctccactgcatttgcatacgacatgcgttgcatcgggttgcagttctcagggagccagtagaggagaacgtaagggaccgagggacggccgtctctctatatctcattagtacgtgaggcctgcattattgatggacgacttacggtagtcattgggtggctgaggagaatgaaccgcggcgaggattcgggaagatcatcggccagatcttccatcttggagtagacttcattgtcttgcggccggatttcttgagtctttgtatcaatcatatctatttgcgtgatacgtcagcttcggacgcaggcaatgtatggttatggctggcactatctacgtgctatatagcccgcctggtctcgaaatgtatggcaggtgtgggaaagcgcagagttaggggcccgtacagatgatagcttgcgcatccttggctctcgatgtgcccagacgaaacttgcgcagcttctccttagtctcgggcgagaacgaatatagtcgtgaatcagactactaaagttagcatctgatgggggaaactttcgcctggccgacctggtgccctggtgcggggagacatctcaccattttggacgtcaactgtgggacacgcagagaagtcaagtaaacgaaagttctcagcctagcgctaataatgcactgtataaagatgataccggtatgtccgacctgaaaaaggagaagactgtaggaatgtgaggcgagacgatggaaatgcgggcggagtttccctgttcccccacctcaatccctccacgctttgaacaatctagacattactcctccacctatatcttcatgctcaaccgattgaatctactgacgcggcacttatcacgcccattcagtccctctcgtcctataagcccctccttctcggccccttccctggccgctcgctcaggtctatccgcgatgacatcagccgtgcacccgaagctcatccacacggcagcatgcctcattatcggcgatgaggttctcggcggaaaggtagtttgagatatcgataggctccccgtgaacagaacatatattctgacattatcgacccttagaccgttgacaccaactcggcattcctagccaagttctgcttctcgctcggcatcgacctgaagcgaatcgaggttatccccgatgatgaagatgacatagtcgaagctgtacgacgcatgagctcccgctatgacttcgtcgtgaccagcggcggaattgggcccacgtgtgtccaaccccgtccctagtttccccgagcgatgccgacagcacgcaagcaacgcagcgcttcatacaaagcctagctaacacatgtcccccatttacagacacgacgacatcacatactcttcaatcgccaaggcattcgacctgaagctggaattgcaccaggcggccttcgagcgcatgaagcgcctctccaagccccaccccttgcaacagaacttcgactgggagacaccatcgccaggactgaccgccaagctgcgcatggtcgagctgcccttcgacccgaagatccccgctgagtcacaggccgtgttcgtcgccgatgacctgtgggtgccgatcgcggtggtgaacggcaacgtgcacatcctgcccggcgtgccgcggctcttcgagcgcctgctgcttagcttgaagccctctcttattccccgtttgaccgacccggaaggcaaggggacgttccgcttgttgttcagcacgccgttgcctgagagtgcggtcgcgccatatctgactgagttggcggctagggttaaggctcggggggtcaaggttggcagctatccgcgttggggtaaaaagcgcaatactgttactttggtcggggcggataaggcttacatggattccttggccagtgaggttgcggagaatgtgcagggtacgctggttgccacggaagatgagctggattgtccgtccgacgaggaccgtgtttacagtcagtagattatttattacatagttgtctagattgactgcgacttgaaatacatgcagcacatagagcctaccaaatatatattagtgtcaaacatggctatcttgaccaggttagattatcaaccttgatatatcaaagcagtagccgtaggaaccagatcataaattgcgatcgagaataggcggtatatcatacgcagagcattcgagagtagatagaacgatctagatactagacaacctcaaaaacaaaggtacaggccgcaatgatggaagcaaggcatccaccttgctatgaaagaacatatattgacagccgtgtcgcctcacgagagcgacaaggataatgataataagaggcgatagataacaaacaccagggatctttcgcaaagacttcgacagtaaaaagacaataaatagggattaaaacatcgcaatcggacaacaaaaggggaatcaaaaatgtttcgtgagacgaggttgggcgtcaaggtcggcagtcatcaagaatgcgagtccattgaagaacccacaaacatccgtaacacaaacgacaatgccacttcttctttggtaatttttttctggtttggtttgttttctgttcgaggttgcaagctttcgttttgcagtctctgtattgtttcccatttagatctgagtggcgggttattgcagattaaggccatccaaaggtaaacaagatatccaacttttccaagggcaggtgggtgttcaccacatgctcggacatataaatccacccccgtaactcttcccgacattgtgtgctgcgtatttcggattcgggggttgtttcgagatctgccggcatcgcaacgattcggatcattttggtaggttggtgttttttttacatgatgacgcaactcgcgcagcaaccagcgctctcgcctggctcggccacgtccatcttgccctcgggtgcgcgggcgccgaacgcgccggagccggaggggtacgaggacatttccttgttgtagcgacggatctcgcggacgaggtcgtagaaggcgttctcgacgttgatacgggacttggcggaggtttcgatgaacttgcagccgaactgacgggcgagcgcttcgccctctgtacgcggtgaatgttagtttcggggttcggatttaggtttccagagagttcaagcggagagttcagggtaatggaaacatacctgcctcggagaccacacgctccttttccaaatcacacttgttggcaacaacaatgatggggaagtaatccttgtccttgacgcgcaggatttgctgttggaaggtcatgatttcttcgaaggattggcgtgatgtaatggagtagatgagcaggaatccctcgccggttcgcatgtattgttctcgcatagccgagtattcctcctggcctgctgtatccaggacatccaacaaagcgacttcatcatcgatcacacactgcttgcggtaggaatctgtaggcggaagaaggttccgaattagccatgctgttcaaccagggcccggcaccgctggggaaaagcgataggacccgcgcggttgataaaatgggttgaggggggacgtcgaagtgctcaccttcaattgttggatcgtactcgtccacgaagtggctctggatcagctggatggtcaaacaggacttgccgacaccaccaccgccgacgaccaccagcttgtattctcttaggaactgttggagacggggttagccatttggaatgaccaaaacaagtcggatccggcacattggatcaccatctcacctttgaagccattatgagttagtctcagggaagatgaaacagaaaagagatattaagccgatcagaaaggaatcggacaatttaaagcgaaatccacctgggtcgtttaagaaaaaaacaaaaggagaattagggggagagttcggaggttggaactggcgggaagaaataaatggagaaaaccagcgagcttcgaagatttggcgaattcgttcaaatccgtctggggtaaacaaaaggatttaaaatcaaacacaaagagatcttgttcccttttttttttctagagaagacagaatcgaaagaagaagggaaagaaggggcgaagggaaattcaggagatagtggggaggaaaaggtgattgggcgaggaaaaggggacatgcgcgccattgaatgatagattgcttttatatttactattgttcctaccgtttattttggttcttcagctcttcgattcatctatataacacaagtagcactgtgggcgccttatctccaatttcgccttcctccttcctccttcctccttcattccgatatacgttggtacactaaattgtatctcggccagggcattgattggcttaagccacggacccattgaggaacgtgccattctaatatagagcggagatattgctccttttacttgcatctccatcaagtccgccattaccggcctctgttttgtctactccgtgctggttccaacacatctccaacataccatcgccagatcaggtcagttcctccagagtggatctgccgtcccgagatgggtcctctttggcgcctttggggattggcctacaatgtccaccctctactccatattggctggtgagagataacacgaagccatcatccagatagcaattcaaggttgggatagttgggcaccaaacagtctggatggtttgctcgacaccgcatattcatcttggctttcttatacgcctggatggcttgcagtagacgcccgccttgcataattgcatcatcccgccgcaacacagtcagctctgtcatttttgatgattggatccatccaaaaaattgtgattctcgtcgcggttccacttttagaacccccatcgtacgaatcatcggaacgtttgatgccgacaactgggttttccccgatcgccgtatgccttacgaagatccaagtcacgcccgttttctgacagatgacacagcggcatattggacgtccacacttcttttcttcggtgttctctgcttataaactgcttagactagcgttgacaggcggaaccccgcgattgaagacttggatctggccccggagtatgtgcagtgtcacatttgggcacctcaagctaggtaatgtctataacaagcttcacctagctatactttgacactctttgactttttaccgatcatagaatccttgaaatgatgtcaaagcgaacgaaaataaaagtaaaaaaaacaattatgcgcttggtccacggttcttccccgggggccatgcccgtcttgacctagacaggactctgttggtgtcttttccacggatgactggaactcaattccttgtcggttcaaatatttgtctcaacgttggcaaagaggcgagatcaacctgggatgtcccgatattactagtcgacattcaaatttcaatatcccattccatacattatcttagaaggtgagatttgataatccacaaggctgcattctttgattcgcaatgtgggctgatcctgatatgacccgtcaaacggacggtctgtgatggatcatggctcgggtgatcatgcaactgtcagcatccggaagtagtgcgactgtgtttcgaagcagcgcttatgaaggactaccatgggacaattacgagaaggcgaaaatgagccgcacaaatcgatatagaaaatgcaattggtagacattatccagtatctactgacaaatctacttgccaagtcacacagacgtgatacatacctagaaccaacacaacctaggcttgcatagtgcggagcgatcatgcttgtcatgccaacggccaaatgcattttgaaatcgagaggcgcaccatccacatagagtgctttatacatatatcaaccagctcaataaatgtatactcgaaattacagctgtcccaggaaataagaaccggacagataccccgggatcacagctaagaaaagaccgaatcacactcgacctaacttgggaccgaaggcatcaccaatcgcactcgacgtgcaacagggcatgggggtacaagttcctgggcacatgagcaataataataaacacaacatgtccaatctgtagatttaagtacctgaccctgaagaaatcaccgtaaaaatctgtctagagaacgagcgcgacccaatccgtgccctacccaacgcccaaggagactaaacaaactgacaacaagccaaacgccgaatatcccaaactccatccaataacctccaatgtctcttgcagatctccaagtcggcggactgtatgtcattctccaagcccatcatgaaccacccgagcccaatgagttctactggggtctatacctccactcagaccccgtgggagggatggcataccacgtcatagacacaggatctggcctgagaccggagcacgagtatactggtagaatattcgacacgccgcttctgacgggactgttccgaatcgccgatatcactcgtcccttgcatccatttgtcgacagggtagtaaggtcctacgacagcagcctcaactgtcccggaagaagcagcaacagcaagttctgggttttgaatgtccttgcgctactgatccagcctacggccaccggatggcttccagtgaattgccataacctgccgatcttggagcaggaaatccgcgattgggggaatcgcatgtcccaagggcgatgtatatatcagagactaaagccgattggatcttcgacgatctgcgggttgccggaatggaagatatagcgtgagttgaccatttctctcggtaatcctagtgcgggggaaacatcgattgacgcaaaggcaatggaatgaatagccgaataccctatctattcaacaggtccaatcatttgactatggtttcttgtttcgggcgctaattgacgggtatattatttcgtgtttatcaaatcaagcgattacttgcatattctacctgtcatttttttggacctaggttattaattccaaagcttaagcatactacattgactcatagtaatctgctctctattaatactacagttacttccataatctcccttggcagctcaagtctcatccaaagtagaaactggtcaggtgcctgtgtgagaagtacctccacacccgtaacagtgtcccacccctggttctgctgtgctgccgtcaatagcggcatcttcctcggcttgtacgacatctcgatacacaaacccagatcttcattcaacgagactgatcctcggtagtcgtatcatcgggtgccagattgaggagcagtggcgtttgcggcctggggggaatatatcctgaaactggaccgggggggggttgcatgaatgtctcgagacagccgaatagaacaagggaactaacttactaaattctagttactggaaatgaatactatagacatggaagatcattagaccaaaagaatcggtttctccaaagattttgcccattaaatgtttggtcatcgtcggcatgctaaaaccgtttgtggggagaagcataattattgtaccgacttgccaaagagtagtcatatggaaaatgaattgatgtatgcaaggatgatatgctagcaatatatcttatgaataacatgcatattgtagtcgcaactctgcttcacaaacttcaattgagctgaagcctctgctgtagcttcttccaagacgcaatacccctctgcgcatgctgatcgggtacatgttgaccctcttcagccatcgttctcgaaaacaactccatcgagatccatcccttgtatcccaatcccgacgtaatagttcttgcaacatcttccacaggcagatatactccgcggtcctcctcgtacatgtaagctctcgcattccgcgaccagttcatccgcgccggctgaccttccacgtagaacggatgacccgggaccagtggcgattgcaacctctctgcatctacaacctgaagataaaagacctttgcaacatcgacctcggccaccatccgctcgagcgactccttcaaatctgaatccgcattggccgtcttgccggttggcgaggtggggtcggcccacaccttccccgcgatgttgaaggtgtcaagacacatgccgaaattaggtcggtcaacgcgcttaaccacatcccagactttctcccaggtgtcgttgaccgtgctccagcagagattctcatacgcatagcgaataacgggagtttcggcggcgcccatatccgccagttgcctcagatcggccactataacatcaatgtcgtccgtaagttgctctgccgggaggaagttggcggggatttggatggtggtggtgtccaagcgtttggcgagctgcagccacagtttcatcttttcaatcagctttgcatgctgctctcggtctttgagtccctcgtagaagaggaacggctgcagcgtgataatctcgagggagtgggcttgacagattgagtggatcttatctgctgcttggagcagttgattggatgttggggtgtcattcttggaaatccctcgtgcgaaataatcgaggtcttcgtagaaaagctctactcctttgaaacccgcttttgaagcttggcccatcttatattcaaaatcatgaagccaaggtcgtcccaaggagacactcataatagcaggttgatagaccatggtgtctctgtatgggaatttgaatttgacaatgagttaagttggtgagatattcctgtggaggatgttgatgctatgtacgcggagtccacgggttgtggggtaagaaggtcttgccgttgtcggttcagatcttcgccgtacgtacggaggaagattctacgattgggtctaatgagatatttctgcatgttgactgttggcatatatgacttgagaagtctcggccctggtgcttttctcctctcaagaaatcatctcttcaccccaagaggaggaagtcgtcgcccgttattggggttcgggtaaatcaacaccgatcacgtgatacgaacggcatcagcttggatgaccatgaaagctcgagaaccaatggcttttatttatttcagagcacatatgcccattcttcgaccttcaagtgttcaagtgtttgcggggcatgtgatcaatgtcgttggtgaaagtccaagtgtgagggaactgcctgcttgctccaccgcaatcacatcggagcactcggaaacacacgactactaagggatatagactttggtcggtgagtaaaaagctggatagggggtaatcctcatacgagatcagttagataaagacctatcaacataatgttaatttgtttctacacctcgactaaaagcaaaactcgatattataaaatgagaaaacgtgccgcgaaaaaataatcccaggcttctttcatgccaaagatgaaacaatcgaaagccaacccaggccagccgatgctgcttcgatcccctgagtatccttttgcgggggatgggtggcgcgagccaacctcgacaactggaccgcgagcaaatgctctctgaaatacatatccaagccaccaaccatgtgaatgctgtgatcaacaccgctccctcccttcttctctccccagcacagcctggggccaacaatttcatcttccatcttgccggtcctacttccacttttaggccacacccgcttcgtctcatacaaagtctcccaggcgatgccaaagctcccaaacatcccgccttccttcttaccctctgccgctgcactcttccaaacgaaattgcgacctccatactcaaatcgtcgcggcgaccaatcctttctctgcatctccccatccggaatctcggtaattgcgcctatatcggggattgtccgtgtggtcatccggaaactgcctcctttagtcttctgcagcttcacactcgtcgccccgatctgaggtaagaattccccggcacgtcggagtaccgtgtcgacgatgggtgcctcgttgctccagacgaattggagggcgtacaagacgtgcgtgttggtcgagtctttgacgaaaaaccaatatgagcgcagacccaggttgaccagctccgaggaatgcgtaatccggtacgtgactgggggcgccgacggagaaagagtcagcgagaagaaggggcgttgcgaggtgtcggtattgaggaatggctggaggtgggctggagctgtgctgatatccgttgcagattgactgggatcgtctccgcggaaagtattaagatccttgcgaatctggcagttgatcagggtcagtgatctagaagaggtgtacggggtcctggactgtgtggtttacctgggtcaacgaccaagtcgttccgtcttcgttttccacctcctccatcgcatccaaaatcgtcggaggcaatattataccatcgaagctgcccttgcgctttaggtcttcgagataggccaggcgctctcgatgaacttggacctgtctctcaaacatttttctgttgattttgaggacatttcctttcttgtatattttgattgctgaatccaaaacagtgatggcatttttgtagacttgtatggcttcatcgtactcgcccttgcgttccaaaatgaagggcaaggcggcgagcttgtagaccttattgttggcatcgatttttcctgtcattgcgttggtcggaaaatagtatattaatttgaaagatgggttctatatctggtagtagtgatcggttgagttagtagacctttgcattcccatggcgctcctttataattgaagacatcggagcttttctttgtagcttatgccaaggtaggaatatgccttgccaaggagcttccgtgtaaaatcgagcctatataggacatgagttcgtgtggcagttgtcgctaacgcttgtactcgaatcagggtgcagcttgggcttcctttgggagaaagaacttggcattttgatgcaaatgatcacctgcagtatcagccatgagtccatgacagtctgtctcacagagccttatgaacttcagttgagatatgcttggctgattcttggagaaaaggatactaactaatcgcttagtattaccctctttgaagcttggcaatggcttagcggggaagcactggctttggggcacatggccgtcaagcaccttgaaacatatggtgactcagccttcaggtccttcgactattttcaaaaagttatgtttgcgaggcttcggccaaatcaaaacagcgcgcattgaatcacgaaggaatgggttgagggatccactgagggagctattattttccatctagggacgtgaccatgataatgtgataaagaacaagagcctctcaaacgtaactggaattcttacgaaatggatcccgaccaaggctttgatgtctttctagcatggtgtattgacacggtccgtaactacaaggaaagagtgctaaaagtcactttcgacactcacgcttgaatagaaacgtatagaacttgaacccattttcaatatcgggtgccatagagataatatactactttcctcactaacagtgccagtgctgcggccaccacctctgttttctccaccaagctcagtgcaaacgttgataatgtgaaaattgaacacaagtaagaaacatccgatgcttaatcttcctgtccaagctgtgacatgtgattatagtgcggggtcaaatctatcatacaagattccgtcagccattcttctctgatcactgacacataaagtgattgctttattgatcaatattcgtgataatagtcctcagaaactatacttcaagatgcagactacagtctttgacaaagcttgtgccatggagcttctagaatttgcgaacccttttcttgaggaaaagggtctttcgtcacactcatgggccaaaatgcctaatcctgcttgctccgctcccctccttcgagtatgggacaaaaactctggcagtcatcccgatcaatcaaatagaatgctggctcgtttgccccgacagcggttgggttcgcgagaaagtcgagaaaagtcactagccacacatgctgcctatcagatatgggagccaacgccattcatatcctttactgcatcagtattaggtctgcaaagattcctgtctaggagaaaggggccacggttcccgcgaacacttacggttatcaatccaaacgttcgcatcgccaacggtctaccgatactcgaaatggaatcagaactaagatattacgaagtgcaggacccatatagaagggcgtattctttctatagagatgaatatctctgtctttgggaggttacgcctgatgaggtcgtagcacactgggactgggatgaccttatagaggacgtccattggtacgaggacaaaatactacctgctttcaaggagcacaacgatcgcttcttacgcagaagtcagattgagacgacttttgatatgtcaacactgcaaagtgctttgcccggcatgttctctttctcagtcaacagagacgaactgtctgggtcagacctggaccgttctcctgaagcagactcatttccaaatgaaaattggagtttctcaagcgaggaggagaattggcaggttgaagatgacacttattgggacacagacgatgaagtggaggagtccaacgcgattgatgattcatttaagatccttgaaggcgactggtgaaaacgatccttgcagaacagggaatggcgaaggttaaagaagggtagattgatgtctaccctggccctaaataaaaccacatggagcaaccctgtgattcaaacacgagatgtcaaaggctcacagtatcaccaaaaatacgactttttcctcgtgtcaatcattatgtttcagacatgcaaggcagcagctgccgtatgaattctaccctacactaaatcatagatattaccgggctcgcttcagtaacttagttaattctatagtatcagaacctttttaagcttcttctccaataacagctgccagaaggcatttgggggtccctgtagtagctatacaccaccattacacgctagtgtattttttaaaaaggaaaaaaaggttgagacagaacttttgaaatggacctccataggtactatgtagtatgtactgtaaaagatccccacaatgctaatgttcctcaggccatcggcttaaattgaaaaggaaaaagaaaaagggtcgggggaattgaggctgagggtcccggctaggcagccaggcagtccagcaagggactagcttggtggaaattggccctggagccccgagtccacttagataggcatatcatgtgttacttggaatatttcggcgctctttttctatctataaagtcctaacgagcgcaatatttttagcctaagagtacagccacaccgtaaccgccaaactacaaagtacaggaattggaaattttcgagtcccggccaggcttgccctgtctggacccttccgagctattttggtggccattaaggggtccaggtggccgcactagcaccgcactagcaccgaagaggaaagaaaatatctcttagtcggctagaataaaaggaaccagccaatgggaaggcttcgtttcagttgtagatttccaagctttccaaggtttccgtctagatgcttactgcgctgaaattgaaatggacttatataactatctccaagtccatcttcttgtctccttttcacgtacaaattccatttctgtcgctcgttgactaccccgacattcgttaattcgtcatttcgttcattcattcattcattcgttattcattcaatacaacatgcgtctccaatctctcgctcttttggccggtgccactacagccctcgctgtccagacaacctctcttttcctccccggattcgacgagcaacgaattgatggcaaggtcattggcactgtatgtgcaatcatcctctctgttgatttagcacaggaagttgactaatatctttccagagcggctccatgaccaaatattatctcaagtgcgctcccaatgttgacgccgacgagtgcggccttcccttcgatggtatgaccgtggcccaaggcccttcaaccgtcagcctggcatacagcacagaggatgtgtaagtaactatctgcaccacttatatatacccccacactcagagctgatcctttcccgaaacagcaccatcagcgagagctgcaagttcgattccataagcgcgacgtgcggcgcaaccgtcgtgaccgatggcagcacctcctcgtggcactcggccatcgcaatcagcgaaatccccggtggcgtgtacatgcccgtgactatcactgcaactggaactgacggctcttccgccaccactggtgctgccgtctccgcttctacggccgcttcgactagcgctgctactatgactacctctgcttctacttctgatagcaccgctgctggaactagcactggaactagcaccggaacgagcactgacagcagtgctgctgccaccagccagactgagactggtaatgctgctatgcctatgattactggaaacgcgcgctgggctgccggtggtgttgctgctgcactggccctcgccgctctctgatcatcgggtcgttttcttggaatgaacttggatgcccaacttcgttaatgcctgtctcgataaatatgtacctttctcatgtataatatgcaatatacgaagcgtgtaatactttgtacttcggtctgatagacctttcaaaacctatattgttggcggtcgaatatgtacttcatattcacgcaacacaaccggaggccttgcaacatgtacaatgagcgccatctaaagcctctatatcttcactctgctttatggagtgtaagttacgacttgcggtgcatgacgccagccgaagcctatagattgtcagaacatgtctataacaagatttaaccgcaaaataagcttacctggtggctggggaagaccagggtatcggcgatcacaacgttctcgcgacgcccagctgcaaagacaatcacctcggcgatgtcatcaccggtcaatggttcgacgcccctgccaattgttaactatattctgtttcagttcccttagcatgacttacttgtagacagcatcagccttagacttgtctccatagaatcgcacaacggagaactcctaatcacgatattagcttcatatcaaaggcgaataatatatgcgatgcccataccgtctcaacttgaccaggatcgatttcaatgatacggattctcgtggcgacgagctcctttctcagagcatcagtgaacgagcggacagccgccttggtggagcagtagatgctaccaccagagtaaggctcgcggccggcgatactgccaatgttgataatatcgccacggccaccctcagagcgcttcttgaagatgggcaggatggcctgggtcatgttaatgagaccagtgacgttggtgtcaaacatgaccttgatatcctcggcagcaatcgaaggtgcctgggcaacacccttgaccaagccactttcaccgtgaatgtcagtatcgaccgtgcatatcaatcagtttagcttggtgtgcatgactcacgcattgttgacaaggacgtcaatctcccggaactcctcgggcagggaggaaacaaagttgctcacttcctctgggttgctgacatccagcttgacgggaagaacctggacaccattgccgacctccttcgtgatctccgccgcgacctccttcaatgtgtcgatgcggcgcgcggtaaggatcaacttcaggttcttgggcgacgtacgggcgaactcctgggcagtgctctttccaatgccagatgaggcaccggtaatgacgatagtcttgccttcgaggcgctttgccattgcggaagccatggtgcgtcggatagaagttcggaaggtggggcttgcgaagagagctggggatgtagaggggcgtgagagtcgttgaaagagtccaattaatctgaagcacgctcgtagacgggtcatggatcgaagtctctatttttcaaggagaaatgaaacgcagaacccaaaataaatagattgatcacgaacgagtgcggggactctggcgtcatattgtgttatgtaatcccagacaacgctcgcccgcgatcggcaagaaggccgatatttcttatctcgagataatcgtgccaagcccccactagttatgggccacgaatcgacgtacgtgggagtaattccacccttgccgaaataggaacctaccgatgactattcccgtatagctgggtagtgaattgggtaattgtgcagggagtaagaagctagcttgggaattgagaaaatcaaagtgttcattttgtgcctatgtatctgctgtatggaatatctatacaaaagatacttaatgcacagtgactcacaaacacagcaaagatgttgtagggcgcttgacacggttttcggaggtcatgttgataatggagtttgtctctgaatgcctcatcatattctttgtactccttagagtgactaagatgggagacaaagccccgtaggacttgttcaaagaaatagttcctctttaaaggaaaatgccctaattgggatggtcatcttgaacatgacaaagggccaagtgcatgatcatggtgattaacgcgagactcgttgtagctggacaaagatcaaatgaatgccattgtctacatttccttggaggacatcgattcatagttctaaagaccaggtactgcccccgatacatctaataaataaccttgatgatacccagcagtgtacagcaatcacagcgtcggctctttcccttgagcccttttttgatcgttttgttcagacagagagagcaagggtcgttccttctatatccagcgcagcaaaaacaccacggtaacctaccacctcttcctagatacaaccttgttgacattctaacatttgcttcatgtgcatatatcctagaatcacgaccacacggctcgattgcaattacttacatgggatattgatgacaacatctatcggatattacaagatatttcatcaggatgccttctccagccagggtttgctatatgactcctctgaacattgtgtcaaaccgtaatggaagcttacatgaatcttcttcaacccagaaagcttcatctgatgagcttcttcgccggtgtgattttgattgggccgaagatgttggggacgctgcgaccaacgataattcacatatgcccatcacaccagaccctcttggttacccattgccaaagccagatatacacaatgagatatatcctactactcgctatcttagatatcccaattataggccatcactcccaactgtctatgaagaagtctgggatgagacattgggctgggtacatggcactcaagatataacctccagctcttctgagagaatattcacagactccgatgatgatactaccgatctttcagcatacgagggatctcccatcaatgacgagttagctcagaacatgttcacagtcaacggtgaaccagacctccacttggctgcacaacagtctatcaacaatatctttggggaccgtcaggcctggatcaatgccgatacagggattcatcacttcaactggatggggctacgagtttacacacgcagctcgacctctccgtctgattcgctagccattatcctcgcaaagccaaaaaagccacagggaggtgccatgtggagagtttactcagttctaaaccgagctacccagtacattgaccccgtacttgtatttttggatcaccaagatgaaagtttgtttgaactccgaggctcagagcttgtacgtgcctccgctggacgtgttttcaaattttattcgcctcatggaatgtggatggaggattcgagcgatacgaatgacgatattacgacagactttggtaatacccggacttacgaagcgacaggtttagccgttggaaatggctttgttgagtcgagtgccattcgctcactgtcacaatggactgagtgccgtgatgaagcctctgaagccgctgagagatcgagtcggtttccccgacggaggacttgggagcggaaaccctcaccactgcgacaatgcgagtctataaaagactcagagtaccctgaggcctcaagctcactggcgttcaagcaggcgaagagaccgcctcgtaagattacaacttgtgtagctggggcaccgcgtgaagaatatttctccttcccgactcctatctttggtcgctatagggcaatcaaaaaagcattccaaaaggtgcagcgggggtggaaatcgatgctcagatcaatcaagcacactctgagctaggtagtagtccctcttctcctcgatcggattagctttgcatctaatttagattgtttggatcttgaactcacatttggcaggtttcactttgctctttgattgccgcctgtttggattgatcagattgagcttactctttggatttgctcaggatcagcttccatttggcaaggatttttgtggattttctattttctccatgtcgatatttcaaatttattgttgagaaaatcaagaaccaaagaaagggccgtgtctcttacgttcaaatgttgtctttctttcatttcctttatctgactatcagcttggttttgggccactttcatatctggatgagtccatcatgccttcgttttagtttcatttgtgcgagatcaagatctatgctgtacatccttatcaaagaatttatgaaggcttccttcaatataaagcagacaagtagaatgcgtacatgttttgaagttctaaatctcatgagcacaagcggctgggtatatatattcttcatggatggctggcaagcaacgttgccggcggtggctgtccaaaggatatctaatggcgaatgatcacgtagtgtctttatgagaaacaaccagagcgcattcggctagatgatgtcggaggagagaaggagaggtgaacatgtaatggcgatcgtactacgttgtatctgtaaagaggaaaacaactggtgtcgattctgctaagttctcatggacagaagggagagagagagaggaagagaaagcggaactatctggtgatctgtacccacatgggtgactgccttccggacacccaacaatatctgatgcaatccggtaggctcaacgcggacttgattcataagtctccattctcacccgctttctgacagaggatctatagaaaggtatgatagactccgctcgcatctttcaagtcttccatccaccttccatgtggcgagtaaaacttaaaccaggcttggattctgaactgcactcgacatggccaaaatttgttgatatagtgctggatggcgtgatttcgaatgtcatgccttgtatggtcccccactcgatgacgctcttgaactccgttcctccgtcgaggcgccaaatcctagggtatctcccggtcctaagcttgatcttctcgtagaacgatttcagcttaacggatgcctcgcccttattggttagggttggtccttcgaggtaacgggtcgcatcgtcgaaggaaaagtagtctgacttgcagacacttcctcgagagtgccgtacctcgtcggcccctcggaagaaaacgaagaagactcctccgacgagtcaagtatctgaccactgtgttgttgtcctttttcctcaagcaccttccgttatctggatttttgctgtacccgaatgcataaatgcaagtgacacctcaggtgttcgtgtataaactggccagtcgagccagatctagtggtgggttgtaccatcctggttgcaaattgccgctcggtacttgaatttgtcgagctagcaccgggagaccgtcacgagctgcagaattcgagctaatcttgacagttggactggcttcaaggacccaagaggtacgaatgagcgctcgaagattgggaagtattgactgttggattaaaataacagtgcgatccctatgcttcttgttgcacacttgcctagggcacaggctgttgctgcgtgcctagatccccccaaacacccagcttctttggctgactctagtacccgattggatgtcaggactcgatagagtgtctggccccgcgagcaggggacgtataggtcattggcgcgaacatccacaacatggtgaagtgcagacttgtgattctcgatttgctcgttgatagtgcgggccaagctcgcaccccccgagaggaaaacctgatcgcgataaatctgcattaggtaggatgcatgtagattatcctatcgattttagccacaattagtctcctagtcccctcacaaaataaataggcagagtggggaagacatactatccgagtgattgtgaaaagccatccaactcctagccaagatgattcctaaagggaaggagccgttgggctttgtgtataaatgaatatatcatgaatggcttctgtagcaatgagaatgcgatataataaacgatcacctaagaaaaagaatatatatggatttataaatgatggtgatatgaaaatagaaagagagccaaggaggcagagagctggctgtcgttatatctaggtcctgacttacgagggccttaggccatcaagcattattctgtggcggagggagagaatgtcacggtctacgattaatcgctatcatgtgcttcatgtttgctcgtttgctcgctcgactactgtttgcattccatagattgtttgttagatagctaagcgagaaggttggttgtttgcaacgtttgcaaagtggtcagctatgtcattccactttgcaacttgcttcttctttgttcatcctacgttttagttgaatgcacttcatagggaccgcactctttcccttcgacgaggacgcaccctgtgatgagggaaaaggcgtggcatccgcaccgaaggaaaaaggtattgttaacttttcaggtgtacgttcctaatcgggtaactactgcatcttacaccccttccgatttactataccgccttcgcgggaaatagcagctaccgatcatgtgatatttttgtgtgtttttgattactaagtttgtccacaagattgccattttcggagcaattgtttttatttttagttagttaaagattttattgaggttttctgccacatatacactcgccttatcatcgattttccaccacttttcactatgtaaaccggaagtgggcagaatatacggcagaaattatggcagaatacattgtcgtgcctaatcgggaaggttgtactgagggttgcatcaacaatcctcatattatactttgttcgagcataaatagtgtactatgtagcagtatatgggcagaaggaaacacctaaaatggttgagtctcctttttctttggtggagagtcctcgggggtcgttgaatcaacgttccccgacattttgggctaaaggatggtgaccgactacacgaggcagtagatcaaattgggtttttgtactccgtatgtacagtagaacggccaagaatgcgacggtcgacaaatcaaaaagtcgaacggccagcaagattggcggtcaaccaattggaaggatggaagcgcactgtgtggagtgcagtgaccgggatgtaagtctcggccggttggaattccgattcgcgaaatgagattccaggatggggcggtgcgatgctagcaccaatgggaggaaataagggattgaagcttgcagtgatgcagaggcttcaagaacgagggcttatgacctgtttgagatggaatcaagaagtctatggatgaaaacgtagatactatggaaagtctcgtgaattgcgtgaggaaagaaaaggaaactacctatgcgctgggactaaagtagttgtcgggagcggagagaggtgacttcgaacagttccttttcaaatgggtgaagaaatatcagagtgcagtgaactgaatcagagtgcgaactcatcacgatatcagctgcgagcaataataacctgtaaacaaaattctattcttcaagtatctagcgccaaactatcatatgatatccaaccatatgaaagcaagccaaaatgaaaccaatcatagaaaggaccgtagtcctaaagtgactgaaatgtcacttgacagtggcagcattccgagaaagaacctcaacctcaaccctccttagtctgacaatgatgaaagagtctcaggtaaaagcacgcgtggggtgaaagctgctcttatcaaatgcaatgccctcttcatgaatccccacatgattccaagggggaaaacgaacatttcgcgggggatgttactaaaagtaaccagaggcttttcgatgaatatgcccatactgccaaacgggagagaaaatactgtattaggaacagtggtaggcacaggccaggtcttcttcatgatggttctcataattccaatggggaaaacgacagagctgtgaatcgtctttgtggtgatccgagccttttgagtattgcccacgatctcaagtgggacagaagagaaagtgaggggtcggcttggtggtgatagctccttggatgatgtcgactcgatcttgagcttggaaggcgtcggcttccaagtgcgtttccgaggagagcgaacgggttccttgctggcagcaactagttgatctcgccaatccaaccactcatatcgagaaataaacggtccaccttcaagaaggccatttgcaacggcgaatcgcccgattgcaaatctttccaattctgactccccagcatcaggaacgatccttcgccgcattgagaaatcatcactcatccaatttccgtggagagaatagtgagtgtaggtgagaccttcgcatgcttcaatcattgcagacccatacatttgcaagataccttcgtcccctctgtccacttttaaaatgacagggtcaatgtactcgattgcacatttcatgatcgagtttacacggagcttatctcttccccgtggtgctttcggtatagcttgcataaaagcaagtgagacccctggtggggtggcagttcgtgtatagactggccagcccagccagttccagtggtggatagtgttatcctcattgcaaatttcagcgcgataattgaactcatcaagttctggttggggactggccagctgtaaattttgaactggctccgtggtcgaggcggaatttgggatatcgagcgactgattaagttcgactggctgcggggagtcaataatttcattggaagacatggtaacggccatctcaggctgatggtccatggcgagagtggcctcagcattatcgaccgagtcggatgtctcgcggtgcaagaggtgagcatatgaatcgtcctataggtatatcacagtcagttcctaaggttccaaagaggtagaggagccggcagtgggaataaataccagtgcgacggctatgatgggaccgttggttgtagcgggaggttcattatcaatagccaggtatttggtgtccatggcggtgtcattttcatcatcctccaaacagtcttgatgaacaggaggtttggaatacttgtcgtcctatagtgtagccattgtcagtgtctgtgtctgaaagtgggctggaagcggatggtagataccagtttgctagtggtagcagggctgctaggaatcgtagccaaatcgatgcccatagcaatataattctctacatcctccaaccgatcaaattgttcgtgctcgagaaggtgggcatatttgtcgtcctatatagtgtaaagattgtcagtatataattccgaagtcgatatgtgagaaagaagtgggaatcaatactacatttctgtcgatggcagggccaatggaagctgtagccatgttctcggtgtcgggagtggggatgacgagggctttggtcttcatagcaatgtcatcctcattgtcctccaaccagttaaactgcccccgagtaagaagaggggaatatttatcaacctaatggtgtagcaactgccagtaggtatgtgtgatggaagtgggtatacataccagttcagtggcggtgatagggacggtaggagttgtagggatgacttgtgtcttcatagcgatgtcgttctccacgtcctcccaccagtcgaatggttcacacacaaggaggttggcgtatggatcagcctagatagtgtagccgtcgttagtacctaatcctttgaagcaatagaccgactaggatagggcaaaataccataataaactctcccattagggcttagataaattgatgaattgaagtggagatggaatagttggtagatgaagataagttcttgatgagatgatgaagagtatgaaggaagaaggaagcagatataattgctgaggatgccttttatactgcaataagcaaccccaaataggaacggcctcgaggatggtctttgctctagacaaacattaatctaaagtgtttcgtctgatctataactaccgcacattcacgagtctgtctcttgttatagcacgcccagcacgtacacaaggttgggatccattggccgtagaataaagtaggaaatagttcccccattggtgaaatttcagccgtctatgccttaagtcaaaaaatgaacaggacttaagtatattagatgaaagtccggagctaaaagagctatttcataccatagagtgaagcctctacgccgtcactgcctgtgaacacctaaactcagagacaagatttgtttacatgggtgatggtagagataaaggccagaaccgtgttctatctctactatttccgaagctaatacggttgaaccatttccaagtccataagtgtcggtcagttattaggttacttcaattgactttcagtgttttggattgctaaacttaatttcgaaagaacatcattatttctagcgttgtcaaatttatagagagtaagtagtgttcacagaacgtatctaaatcctttgttgtcgatctcagttttgtccttgggagatatgagttagcttatatcgaggcttcatggggcttgacactcaccagcatgccattttcaacaccttctgcctcaacctcctggccattgattgcttcgcggtctcgacgcttgttctcgaggtacatgtaaatatacaaagcgacaatacaggccagctttactgagtagccagcgagcatcctgtataaacccagtcaatcaaagcttttgcacaaggatgaatagcaacatacgcaatataagcactgctgtacccaggggcttcactggacttgaaagtctgaggtccaatgatgtttcccacgcagtatccagtgaacaatagggcacctgtcacttgctttttagtgtatccagcaatgttggagctaacaattgtcagactcatgctgaatcccaagccttggaaatagcatagccaaagcgcaacaaggcggccccatttgttactgctaggcagtccgacaaggagacccgctccaagaatacagatcgtgcaggcaaagatcatgcatgtaaatcttgaatggaatttgccatcgaactttgttgcaatataacctccgagaaggagagagacgaactgaacagcaccgcccgggatttgaagatattgagttccgagcgtatcaaatccgaaagtgccgacgatgatggaagtaaactgttttagttattagcttcgtttacatccaattataggaagacatacactggtcaacgccgagtttgggacttgtgcaccaatcgccataatgaacaaaagccaggtcttcggatcctgagccgcttgtcggacttgataccatttgaactgactacttttgacaccttggcggttgatggcaacacgctcgacggctatggcgcgctcacgctcgctgagaaatttggcagttgacggaagatcggggagaagtatcagggcaaaaactcctgtcgcgatggagaaagctccaaaaatgaggaatacatacatccatcgtggaagtccagtggtgatatgtccgaccgcatagccaataagactataattgattagctttcagtcttgattccaatgtagtttcatagaggtgggtggttggtcgtcacttaccctccgaacatcgtcgcgataccattagtgcagtaccatgacgctaatcgcaggggttgttcttcggatgtgtaccacatgccggtcataagaacaaatccaggagttacaactgcttcgatcattcctaacaggaagcggttgattgcgattccagcaaagttgtagcatgcaggtgtcgtcatgagcaagccgccccatactgtttctcttagcatggttcttgagtacacattcctagtcctcataggatatttcttacctaatgttgtaatcgcaaggaacttgccgacgggcagcttttgcaatgctagccctgcagggtattgcgcaatgaggtatccgaagtagaaaatggagcctggtcagattagtgatttgcattataagttttcagaaccgaagactcactgagccatgagtattgttgtccttttaagtgtgtcccttgctttaaaccgtagacagacgcaaagttgatgctgttcttgtccagatactgcatgagattagtacttggattgcaatgagcgagacatgcgaatttcccacctgcagcatgtaaattaagaacagtgatggaatgaggcgtatatcgatcttgcgcagaaccttcttggcctcctgtgctgtgtattcgagaccgtgatgttgtttataaaattcatagttctcgtcccgttctgatgaggtggttgatgagataggaggcgataccgacacttcggcttctttttgcgaggccatgctgtcgatttttctcggtctctcgaactcaaaaggttaaagatagattaaaagacgggacgaggtagagttttataaaaccgcacgcttgactggcagcacggtccatgtggaggattacacaataataataggagccacggcctacaacatacgcaaccccagggagttctatggacatagtggggatataagattccagctagtctccaagggggttattatgcgatgagacagaatggtttctgacaggggtgcaagtgatatctaaaatgtcgatagatgccttgacgggcaacttgggtgtttcgagtagctaacttaaacagcactgatctcgaggctctattctacctaaatgcatcagatactgtctttagaaaagtgacgaggtgggtggagccattcatgtatcacgacatcgccgccgcaattgcgcgtttctcgggccgtatgatcaacttctatctatttagaatcctgtcgcaattggcttgacactcggggctttgccgtgcccattggatcatcatttggagaaacaagaaaatcctgcaacaaatcagtttaggttcaaaatctagttctttgcagaatctgagcggggtccatagaatatacgtttggcttggcacacgtgctgcgtcgagttcaatttgagatcttgcgtattatgcaagtcattcttcaaattagacccataaatcccttctatcccattaaatgcccttacacctaaacatgttggacgttaatataagaacgaacggattccggggaacaaacctcggaaaccaggggccttgattatataatcattcccgacaactcctgcggcccctacgtcatatatatctttctagacactatttcctctgattcctgtcattagttcattgaagtcttgcttaattgtttttgtacatcttaaagagagtgttaaccacctggcaaaatgggatgcatgaatttgtatgttgtatggcgccaaaagcttcttgttcatagggttatcgggtcgggctattccgtgccggcggtctaaatccaggccaggccccaataactatggtcccttcgcaggcggtgatcactaacatggtctcttcttggttttacaatgcaaaactatggcttctctgatcaaatgggccaaggtagtatttagaagagccccttcacctcctcttcgctttccaaccagcgggtttgaaacaatcagtccatcttaaaccctcgaagaagaacggtttgaagggttcaaaaaggggcactactatcctcctaacattggcgatatcctgcgacagaagtaccaagcaccggaagccatgctaaaggcagaatggagctatcggattgatatatggaacgatggtgttatggtaagctcttatcgtgttgtcatgtcctgatactaggttcaatacttcatcactacgagaaactaggcgtgggacctatttgagggcaaggacttgtttaatggggacgatcccgataggaaagggtattccacgcgtgcgcatcttgctgaagtcatcgcaattctaggcccgcctcctttgactttaatcaggcgcgggacgcgaagccctgagttcttctctaaagatggtatgtcatccatgatatgattctagtagactgaacaaaagatttcattgcatgcggcttataatattatcccacggggcattggagaaatgatcttgagatccggaaagatgcgtccttgcacaagtcagaagaatttctgagtggccgaaataaagagatgttcttggaattcatgaaggatatgcttcaatggaaaccagaagatagaataacggccaaggaactattacaggatccttggctaaatggccgttcgaactaggtcagagaaacaatctggcgttggattatatttttcactggggtcgtgtcaacaagaattagcactataaattcttctggtatttcaacttcttgagatcatcaacatcgtcaacccggacgcgcgacttgcagacttcaagattgaccagtatcaacttgtacacattccaaatgtccgatcactttgttaccacgtgctgaacaacgagttcatttctcaatcaaaactcgccagggccctttccgaaaaagctgcctttggggactgtcaaccagggaacggacttagaatcggccgtattggatcccactgtattaccccaccagttgaaactgacagcgtggtagcccaacgcgaagaaaatgatgatggtcgcaatagcagttccggtatccatggctgcttgcagcaaatctacccacgtcttgaattagcgacttattctcaggagtggaaacttgacgaggtaggatctcacagttgtaacgcttccaccagtcaaatgcacgcttgcggatgatatagttgaaaatgaaaccgaagatgaaccagagggaatattgagctatttggtcagatcgagtaatcctaccacgaaactttggagagacatactagtgtttgctggaggaatattacccgccgcattaaagaaaatcgggacattgatgtagcgaacccagctgttgggatagcggcggtaaataaggtacacaagtgtagtaacaacgggctggagagtcagtaaactgcagtaatatcaaagtgtttgagaacttaccccgataaggaagaagtatacaaggccattgtacacttgtccagactggaacattcgctgcggaccaatagtgccccatattaaggaagcattgtacatcactttagcaccgttgcatgtgaagcgttgtttgtttgttggttcgcaaaggtcagtaatatgtccaaacatccatcgtaagactgttgtcgtcagctcaaaatgtaacacagatttgacaaaacatcatacctccagtctgagttgctgtcgctagaatactagcgtagatctggccaaagaacagaacacgcggaggaattttctaaataattagcaaaggtcgaccaagagagtacaaaacaggcataccatgtattgcccgagcttcaaatcctgagcaaaatccatgccgtgtttcactgcattatagccgtagcatttcaccatcagattagcgataggcttcccgggccaagcgtatccggcaatcatctccgttatgatattgaggaacacgcgctggttggttgttccttgcagaataccctcgggaacgatcagaagcattgccaatccgaaacaaaccacaataaagccccagaccggcagctccgtatcccagtatttggttgtcaagataccaagtcccaacaccaccaccgtgagaactccgtaccaccattctggaacctctttatattggcgcatcaatcggcgatgaatatcttcacctccatgtcgtgcattcttaaacctttcccaaatctcggtaccattgtaaaggtatgtatgcacaacgattgcagtaaccgcagcgaaagacagtccataggtcagagaataggacattgagatgtacatgggagagtactccttatacttgctctcgctgaagtccaaggctgagttgagcacacgagatacattgtaggattgtcccgtgttatcgaaagtgctggacgagaggagagggaggctacaacatcagcatattggaatcccctcaatcagactggaaacttactatgcgctgtaccacacattagagtagtacagaatcggcgataagaaaaggtaaaagaacacaacaaccgcaaaagcattgcatgtgatgtagaagggggtcatcagggggtaaccagcgtagtttatttgtgtccagtcgatactgataggtatcaaacctaatccggaattcatctaagcaaaacgagattagtttcatgtagtgattgccaaaattcatgcgagcttactccgaatatcgtgttgaccttctgattatcaggcgcaatccacgtcacaaaggcgaaagcgctcaaactcgtccagatgtagtcggggaaccagaataggacaaatgcaaatgccgtaatgtaggcaaagaagcgataacgagtaatagtccaaccattggctgacgtacggctttctggctcatgtagtgctcggaaaagaacagtggatgacagtgaagtaggccaaaccaaggcagcagggtacacaatccaacggcgggtaagacctgtcagaccaaacctgtgaatgatcagtgactgaataggatagaggaatcaggatgcacatacccaatcatctgtgtcgtcaaaaggtacaggaatgagaagccagctccgaggtcccggttccaatatacgggactgacgatcgctaccaaggcaccttgcgcgtaagcagtggtagcactgatattgacacactgttttgatttgttagatataattcataagaatgtgaaactttgcttatgctcacaataacaatgaacgcgtgctccttgattgtaaattttcctgggttgacatcgaacgaaagttttcctagaggtaccctccacctcggaagcttttcccatgctcttccaatcgggaaaacgaggatttgagcgacaacatatcctattgtgagggaaggctaggagatgttagtaaataccaagtggagttaattgaaacatacatatcgtaggccgaagaattgattcactccggagaaaaggatgacaaaaacggtcatcaatatccaggcccgaacagctgtgataaagagttagttcagccaaaccgagaaagttaatgacttactattgcaggcgatggtgggatcatctttgttggacacacaagccgcaacctccggaactaagaagtgttaaaatcggctgttgggatatatgggtcaacctacaaggtgactggtccccctccacactccatttgaaggcttcgactggtgtgagctctgtgagttctgctctgtcggatttgtacagccactctcccggatcttgattagtgttctcggattcgagatctgccgctggtacttccgatatattcagatctttggcaagatctttagagctcgccatagctgaaatacgtttgaccggatgtgcacaaaagaaaagtgatgttatgagagataaaaaaagacaggacgctgatttcttaatatttgtctgcagctggcaggacgcagatgtgacgatagatccactcaaaatggcaacaagttccttccaatatagtgacaatgccaaagcgctgaagctagtccaaatccatagggttcaaatggttttattatctcagttatcatgaacctaactggttagttacccagttatctacaacatatgttgtacggacacttgccgagacacctgctgacgcaaggcagcaaggccccgtgcggggatacgacgcattgacctagctaggggttagtcttatacattaaagagattccaccgtctgtatgagaaatattgtgattccaagtagtgtgatactagtggcaacggaggaataacattgtaaaaagtgacccataactggaaaagggtacttgtagaaatgctctttttcgttacaactcagtcaagacatgccaagtacaccaacaggcacatcttcggtgtgacttcggtgtgggaagagcttaaattatggatggcgtgccgaggcgggttgatgagcttatccccactccgtaacctctaaattgaccgcctttataaaccgctttccaatcaagtatacaatgccgtagtaagtcacatgagttttaaaccggcagaaccggcagaattaaaagggcggtgaacttgtttgagttccttcaccaatattgcggaggttccagtgcctttagattcaacgctagaccaatcaaagcagcacgatagctgctgattggattcgaggaaatggtgtcattattggggaaatttacccatagtccaatataggaatgtgtcatttacgagggaaacgatatgatattctgacgaaagaagtactacaagaagagcaccatttgtaggattgatacttccaatagaaccttggaatattcggcttgcagctttaaattcagagttatccgtggtagaccagcgatcggacataaccttggctagtgcgccattaaatgcgattcacccatgctaactactgtagcctattccggcggagaaatccgaaaggtaaatatagtacctatttcggaggagagttacttactccactaatgtgtcctgttaagtccgatagcagtgactctcacgaagatatatcttcattctagtcagtgagtgatatatgtcatccaggcaaacatgctcgcaggatcgagaaacattcgccttctaggattgcagcttggagacaggaagttcgataacataggaagtcgtctggatatatctagttccattcatgtactaaacatcaacgacgctatcttccggtgccaaaggaggccgactagctgccatattacattgtctgaacacgcgcacctcatcctcctcaaaagaaccaacaatcgaatgcatcacaccatgattgttgaaaagcaccagatcgccctcctcccagtcatgggtatacaagtagcaaggatcaatggcctgtctttgcatcttgtacagccgttctcgaatctccgtgagattatccagcacctgcccgttctcgagatggattttccgcacacatgttgggtaaaccatcattgcgatcttgccagtaacagggttcttccaagccatggggtacaccctgatcttagaagcctcaaaaggaggcaactggtcttcggccagctccaacccttctgatataatccccaaaccattggagcgggacttggccttgctcatccagatgtatggatgaggtgcgtactcagccttgctggtgcggacgaaatgtttatcttcctccgacaacatctcataaaggcggtatccactgaaaaacgccgttgttccaaggggaacgtcaagtgtagtgtcggtgccatcgtcatagcggcagatctggcggcggcccctggggactttgacagccagcaacgtggtaaccaaaggcggatcaagattgtacatggccgagtcgatgtgccagcggtagaagtgtgtataaccgtgatcttcttcaggcgagatggggttcttgtggaatgtcttgtggtgtgggtgtttgaggcggatgtttgagagtccctcatactcttcgaccaagccgctgccgataacttggacttgtggttgatgagggatggttgtcaggtcagcatggaggacgctgcgcttgtcgattgattttccatgactataaacaccggcggaaggatcgaagcgtcgagtgagttcgtactgggcacgtggggagagtttgccttggcttttgatcacgacgacttgattctcatacaatgtccgacggagaaagtcaaagtcgtcatctaatatgaatcagaatttgaacccaataaagctgttttgagtattgcttacctgtcattgtttcaacatcgaagccggtgagttcagccccaaagtctacccgagaatcatcgggcttggtgacaggcttgcaagaaagagtcatggtagccattttgaataaatcagctgagataaatatcaggatgagaccaatatgaatactactgctgagcgaccgtacgtgctttatactgtttgtacatagtaccacaaggaccaatcaggacggtgcgggtgagatgctgcggctcacccgtcccagctcacccgtccacggagataggatcccaccattattgccaatccatcgagatgataatacaaaaagcattattcgttgagaaccgaacgttccgagacgttggtcttatcaaaaatggtggtacacatacgtggactcgtccgctctgctccattctcgtctctgcttaaaggcagcgttgtgctcaacgacgacaatatatccaacattacctgttgaaacgaatctgaacattgttcgaaaacacgaaatgcctgaatcaacaagtttgaccttcgacctcctctctgatgagatcagacaaagctccgccattggcgccgaagtccaactgcctccaggaatgcccttgctggatttggaccgcttgaccgacaacgacaaagatactctccgaaaagctcttttcgagaatcaagtcattgtcatcagaaaccaaaagggcattgaccctaccgtcttgccaaagctcgctaaggtttttgatcccgaagcatccgacgtccattccgcaggggagaaagctgtgagtgatcccaagaacatcttgtctgcatacaaagcaggacgaatccctagagcccaacaagttggaatcattggctcggggaagttccaggattacgaggggctgaaggagttggaggtggtgcatcttgttcgtgtcccccgtctgaccgacgtactaaactttcatttgactgaccagtgatacaggaccacacattgttccacgaggagcctctcagtcaagaggaattagatgatggctatactcgtccataccggtggcacatggatactcctttctatgagcgcctgccaggcgaagtgaccatcttgcactcaatccgcattcccaatgtgccggatcagaagatcaagttccctgatgggaaagagaagactgttggtgctggagccacggcttgtgagtttatcgaacaaatgcagataggtgcacacacttaccgaatacagtcttttctggcgctcgcgtattttcgttgttgacgccggaggaacaagagtttgctctgaataccacagtcacctatgctcctcaagcatacgagtatatccgccaatgcaaagcttccgacgatggcttgacgatcccgaactttggacgggaggtaccggtggaaaaattgtcggaatgggcgtggggcaaagtcgccgagcacccggtaggttgctattctgactgcacaccaatagtaatgagcatcggctgacaactttcatcagatggtttggcgaaacccgctgaatcccgaccggccattcttccaggtgcatgggtgttgcgtttacaaacttaccacgcggaacccagcgacgggcgagatcacggtaatggatgacgtcgagaaggtcagagaagtggtgtacaagatgcagagtaagatatatgccgctgagaacatctatgcccaccattggcaagagggtgatgtggtcattttccacaacaggggtgtaatgcacagcattactggccaactagccaagtacaaggaagaagaggacaagaggagattgctctggcaatgtacaatgacaagcacaactccccccaagcccttccgggaatacgagggagtcaacgacacgggttatgtgagggcataaattaagatgtaccaatggctagagtagctcaatgaaagaatggcttcgaacggctgtgaattttcgcttttctcaaaactgaagagggtcatgtagagtgtggaatgttccattgaaccatgcgtcaaaatcgatatcttccgctgtatcccacgccggctgcatttcgttaaaatgggcaccgatcacatcttgaggaccggaatttgagaatctgctaacagatgtgttagggctgtcaggacctaggttcattctcgtaaaagtcgagaacttagccagaatttgaccgaaatcgatggttttgttgccaagtcctggacccgaggctgcatcggccgtaaaaattgcatcgattaacgcaacgcctcgttgagcaagcacgtcattacttcgatcagcaaggcgggtgcgagccgcaactattgcgtccttgtggctttgagcaatagtggcttggttttctgcagttgcattaacctcaaagcacataatgaccgcagcggtaatcgcaaaggctgtatgggtccatatcgagatatccccttctcttacaattacctcgtgctcacgcaaaattgtcattgcagcggcaacacaggtacgtcttgaataggtatatgtctgatcattgaaagatcggaagaggaagggccgatgaatcatgataatcttctcggctgccgtgatagcgagacttcgtcgagcgatagccagccatgggatttgtgcttccttcgttttatccgcacgcaaaaggaaagagggtatggcttttacaatggccctcattttctggtctatatgcaggatgtgttcgtattgctctcgcataggctttctggatttcatcggaccgagtccgtcaactagaccgggcatcaattctgccaaagtcacgagcacacggatgtaagtgcttatagtgggagttgtgataggcatatcagtcaagtcataatcatctgcgttcatgggagggcctgtcgagaaatgcattggagatatactgtaggtgtcggtaaaaggaatagcgaaatggtcctgaatgatcatttggcaccataccctcttccccacttctcgttccactctttcatcccattcttctttgttttgagcaagtttcgttgattgatcctgaattttgtggatcccaaggcactcggcaatgcgcactgcagcattgaataaagtcgcgttcagctgactcaatccaagattatgagcgacctcggtcgatatgacgattgcttgaacagagtacacggagaggttgctgagaaaatgtgaattgtagagggtctgcaccatagcagagaacagctgatgtgtagattgtatcccctggaggtcgacatcaacactctcttttactttcgtactatcctggattgagctgacggtggaactcaagacagaaaggtagagtgctggccagagagggtcatcaaatttcccagtttcccagaataactcgcactgctcgagaaatgtcggaccatgaatacagttatgatgccaagccacatgacataaatgaaacttgatcagcttctgggcatctgtcgcattggggaaaaaagagcgcagctccggactaggatcatagactggaagaggactcgtccctgataaagattgaagtccatctttgcgatactggcacgagcacgtcctgtgagggaaacatccggcagaattacgaccccaagcaagatgttcaatagccgtgagaagggacgagtcaatttgatgtgatgtattttcagtcgaactgtgggacactttgccaagtgcatggttctcggttgtacttgattcccgttgtgtcgatgtggtgtcggatacctccgattctgccggatccatgccggtctccagccgaaatatttgatttttgatcttttgaatgacaagaggcactggatcagacggggctgattcgaggtccgccaaaagcgaatgtaaaaattgaatctctgacccatgttgcacagcgttgcgtctaagctgaacgatttctattgagcacttcagattcaagcgtttacatctcgaacagggattttgtttgtcgcatttgcgcttgcgcttcgtgcattctgtatcatgtcagtcgcctacgagacccgagtcgcagcagaggatcggcatttacctcggcaggcttgcggctgacgctgcgatacacggaccctggtcgcttgatttgacgcggtgtcattcattgcccgtcagccttgcatttgattgcctctattttgtcaatttgatgagttggataactccagacctagattttccgttggtactaggagaagtggaatgtgtgagagttgggggcgggagagtctgagacttggcactgataagcacttcgatcgatttgggcaactattaacccggggacatccacaacatcccgaggtcttaaatctcatcagttgttggtactttattcttgtgtatgttatccctctgtcgcttaaagtattgccacacggtgggaaatttggacttaagttttctacgaatccgttcccgcgccccagagatttcagtcggattttttcaaatcccgcaatccaaccagcggacttccttcgattttggaaaagtcatgagcatccaagcatgcctgtctagagttgaggaagctaggctcggctcgggcgaagacatcgttctcgtatgctgcgagagaggatagcaaggctttggaatcgaaggaactaattatggtaaaagcgatgattaacatgagtttaaacttggaggattggaggtgattagattcataccttggctggcgcatatcgacacgcgtgacgagatccaacacatcgacaatcgcgttattggcgccttctccgcggactagttgaagttagatatgcgcaatctatcacgctcgcgtaaacatacacatggtcattgtgtgagccgaatcacccatcaacaccgcccgaggatgcgcatgcgccctgcccaggctgaacatccagtcttccacgcgaatcgatcgcacttcgacatcgtggggaagcttttgcaccagcgatcgaaatggttccgaccaattatcagtcaacttcttcatgagcgcgaggcgctcggcattcgtgtctgggacagggattcccttcgaatccgcccaggagatgatgatttgacagtggtaacggtccttgctactattctcgaaattgtttggagtatccagaactatgaagacatcagcaacccgcagaagagaatagagggtttggcggacctacagctgaagaataaaaacacgttcgattcaggatgcgagccctgaaagatgaaaggatcgattgactcaacgccgcccatctcctcggcgctgtacaatgtcgaggcacctagaagctgcactggcaagtggttcatctgtacgttgggatagaggatctcgcggacacgcgaccgtgaaccatcgcatgcgaccagtagccgcccggtgtgagatgtgccatcctcgaagtgcgctgtgatttcatcggctgtagactcgatatttcgaaggtttttattccactgaaagcacggtgttagcgctatgatagtatgagaaagatgagatttcttccaagacgatcatatcaggacatacttgaacatccacgccggtactcagtaactgtcgcaagcgaacgcgactgacgcgaatgcgctccgcggcggggatattatataatgcgtctcccgacttgaggtcgaaaaactggaagcgaccgacgtcgccacgggcggaagcttctttgttgacgaaggtttccgggaaccgctcgaccaggtgctccggcaataattcacgcagggcggggagtgaccaatgcagcgtcaaaccccatccaccactacgggcatcaattgcggagtcgcgatcgaagatcttgaacgcgacatcatggcgctgaaggtactgggccagtacgaggccactgatgcctgcgccgataatcagaatgggagattcagacatggtgggcatgttacagtgcgcagttctagtagcactacgatttgattgcctctctatacaaccccggccctagtttactccgtaccgaatgagtcgtcccaccgcttggcaagtccgcaaagcccaatacgaaaagtatccggatccttctggggccaactaacccgaaaggacacaattaagattttatagggttccatcggcccctgggacggctcgggttccagctcgggcagatttatcaaagaaatggacttgcctaattaggagagaggccaggacaaagacatttattttacgtcatcctctatattactcaattaggattatagtttcgggcgatggtgttgccttgtgctagccagagttggtttaatgaagttacatcttaattggcaccggcgtcgtatccttgactcaatctactcatgtctcaggcgcatttccgcattgtacggagtacttgtacacgcgggatcttcggggtccaccgcccgagcgcgttgatcctgtggatcccgctttatttgggggcattattcggacaaccagtttgaatcagaaatcttcgagaaggatactgtcgcacggaaagcgatcgcagatttctcgagtcggctaataatgatggctattggcagagggcgagccggatgttgcaataacatggctatatattattgccactaagtcagccacaaaggcaaggggtgtagggattacggtgctagcgggaggggcaggcatgaaagaaaagaaaaaaaacatggatattaattaattcgaaattgcgtccaaagagtgttgaccggactccggacaaaaaccaaaatttgtgcgagttcgtcggcgggatcaagcttccttcctatttggttggcttgccctctaaagatactctatactcgatcgtcctctcgatacccccatgatcgggctcctgactagccaaaatgagctcctcgcttggtgttcgctttagctgtggacggccggaagcagttgactgcatgtgcgaatgccgatccttcgaccaattccccatcaagtagcctttgccttggctgtcatagtaataattcttgcttctgtcactggttggaccgagtcctcgcacgaagcctttgagtagaggtgccagatatggaatgcaagtgacaatgttctaatacacaaatcagccattgtctcacttaggtagtaagtagtcattttcacttacgcccacgttgaactcgatcgttccccataacacaagcattgttgagtttccatctccgaatgccacacgttgtatctgagttagccgcatgatcgagcagactgtggtgaagagaccgaggaggaaaaggcacacaacaccggccttctgtgcagttttgatattcaggctaaggagcaatgggatgggaagcacgatgatggtcacgtcggtgatgatggtgtaaatcgcgagaccgtagaacaggcctcccacgggaagacatgtgcctggtacatgggcgttccatgatcgtcggatctgttgcggccaaatgattatcagtgtgtggtcgcgtatgtccctcgtggggagagattcttaccggtgtgcaattgaacagcaggctcaaagcaccagcgatatgacccaacgtagacgccgcgatcacaatccagatcacaattcggtaaagacgctttgaggttccagagatcagccgcagatagctaaggcaaagcgaagccttgaaccctgcgatcccaatctggtaaaatggtcgtcctgcgtaattaatctagttgtctcttgtcagcttgccggtagaatgtaataagtgcaaggcatcaaactgaaagggagaagatattgaccttcgtatatgtagagtaatttgctgctggccgttgcttcaacggcagccctagcccatatcggctttctgcgatggtgagtatgtttcttgcagcaaaaggaaagctggaggtgcctacgagaaatgcagagtgcactgtatatcacactaaaagcctgctggaatcagtcgtatggtcccttgtatcacgcgcaggttactttaccatactaacaaccatcacatagtctgccgccgcccatcgactggctcgcgctcgaagaaaaagtcgcagggaaaccgtgcaaaccatcaaaatggtgagacttaaacatacacccagaatgagacggtactgcgaggcagcttcaatctcgggggaggcattatgtacccagcccattgctaagaaattgtgcgaagggatacaagggagagtatggacgaggacatagtcaagcgtctaccagggcaggcagatagatataccgaggtttctttcaccaaatcattacagcatacagtgataaaagtgaaagaaatgccaaaaatcaccattacattagactttctttggtggaaataagaccgataatgctagtcatgtaccctgtgctcctcgctccatttctccgtactctcccggccttgcagggttgtttacaatattattgtcctttagctcaccccttcataaacttcatgtaactcccaacacggaaaggtcctagggtcttggactattggttctgattcgttgctagttgtgaaacgtgtagccacgcgatccccacggtgattgcgacgttacttacacttttaccgcatcaatccattgtatttcccaccttttcccaccaccatttcttaaattccttttttttttcatttcccccccaacttccctattaactacgttcttccttgtcggttactcaattgttcccagctgcgatgggtgaaatccaacccgaggtagtagcacatccttccgcagatgagattgatgatgccgtggtatatcttaaaggccatgaaaaggaggcgctcgactctccagtcaatctgcgggcactgcgccgtaaaatcgatcgaagattgatcccttatatgttttgctgctatgtactgcaatttttggacaaggtcatgctgaacgtgagtttgactttcaattcagctgtctgggccatattcctaacgcaagggtgatttcgcacatgtacagtatgccgctgttatggggatcaaaaaagacttgggactcgtcggcaatgatttctccaacgtcgccacatggttcttcattgcctacttgatcgcggaggtacccaatggtgagtattatgatttatcttttgaccatcactgctaaccctcgattcacagtatatttcttacagaaagtaccgcctgccaaatggctcggtggaaatgttttcctctggggtgtcgcggctgccgcgtcttctggcgctcgggggtatcggagcctgctggcagcacgcattttcctaggcatttttgaagcgacagtgggaccatccttgatgcttattagcagccagtactacactcgaagcgaacaagcccctcggttcactgtgtggtatatgggtcttggtgtggcacagataattggtggtatcatatcttttgggttccagcatgtgcatcatgccttattagacagttggcggattatgtttcttgttcttggattggtgacgactgttgtcggcggtttaacctttttcttcatcccggatacaccgatgaaggcaacctggctgtctgataacgaaaaggtggcactccttcaacacgtcagcgaaaaccagactggagtctggagcgcaaatttgaacctgaaacaaattcgggaggccgtgctcgatattcagctgtggctcctaactgtgacaacaattctggtgtgtcgcacattccacctttcgcccccttgcttcaacatcccctgcagttctattgactaatactgcatagatatccgtgtcaagtggtgtggtgacgacatattcctcgacattgattgccggatttggtttctcgggtcccatctcggcgcttctcaacacgccgtcgggcatcgttagcatctttttcacacttctcgtcgggtttggcatccgcagaacttccaatcgctgggcatggaatatactctgtaccattcctggaatcatcggcgggggcttactatccttcctacccaaaagcaacaaagccggtgtgctgatcgggatttatcttgtcaacgcaattgtagctactcttccgattctataccagtggaccatggccaactgcgctggacataccaagcgtgcatttgctagcgcgcttgttgctgggtctttctcggtcggaaacatcattggtccacaaacattccagtcacacgatgcaccagaataccgaccggccaagattgctgttcttgcaactcaggctgcggctgctttactgtctgtcgtcctctttttctattacaagtggcaaaaccaccgcagagatcagactaagagcggtgttgatgcggcggaccagactcggtgggctgggctgactgataagcaaaatcattccttccgttacgtctactgaacatttgatggatcggggcttgaacatatactgtatataacaccgtttgcttactctgtttggctcaaaaggcatttccttggcctgccgtgagttttctggactaaatattcccgttattcgagatggaattggtagtcattgttcatagaagtcaaggcgactagccaatttctcgatgtgaatccatctctaccggtgctggctcggtgttgtcttgtatttcttcggtcggtttgaaataaaagccatagattgatagttaaatgtaaaaatgccattccgtaaatcggaaacacctaggtacttttttgacatgatattgacacacctcaagctaaagtatacactttgcctataatgaaaatagcaatctatcagtcatctggatgtccttcgtatctgcacgaatcccactgccatgtcgtctatacagtggcattcgagcctcttggcagctggtaagattagaactcgtccgataggttggggcgcatcctttggcttaggactgttgtatgtgacaagaagagcctgtcttcaatcaaaacttcaagttccaggttttcagacatggcgtcgagtactatgcacccatggtattgactcgatccctaatatgtaaacagattgttagctcacagaggaaatatccatggctgggcactggtcacaaagcccagatctgaccacgaaaggtgctatgtgtgagcaaataggccactccccttgaatcgaagtatgtagagatggacttcatgccagtcactatatcattgagtattgtagaggcgtcaatgtcgagttgttgaagtttctcaacatactaaaccagccgccatgggatcgatatagtgtaaacgtgcgtggatggtgtcactggttagatgaagcgtcagcatgcaaatagaatatgggaatacaggcaagtatggttcaacattcaaaagatggaaaagaaattggtacagcaaggaaagaagtgaagaagcataaggttcatgatagaatggagcaatgaatgtgggaaggtgaacatcggtagttggatgggacaaatgagctggagaagatgttgcgaaggagggaaatgaacatgatcggaaagaaggtaaagcctcagggataaaacaccgggggggagaagcatgaaactaacatagtatatcaataacatcgagaagaaggaacactgctgaatacgtgtaagagggaggaggaatagcatcaaggtaaaaagaaggaaggaagaaatatgtatagcatcaaaaaaaatccccattcatctagaccgttcctagacctcaggagaggagtatctcctccggccattctcctatatgcctccacaaaccgtccggaatacggcatccccccaagggtgggagcgcactaccaaacaccctagacacgtatgtctaggccgaaagcatgctttgtcgctgacccaagggtgtttgccttgcatactgaaatgcttgtagactttcttgagagctttagcacataggagtccgaaccgacagtggggagctaagcaatacccgttaaggccaaacgcccgttgagaacgcccctcgcaagggacgacccggtcatactaccgctgggccactggggggggctggttgtaatattggtgtttggattcttcatataggacaaaaccgtaaaaagatatgtcactagagaatgttagagcttcgactgctctaccttcctggcctcgtgatagattccgaaacgaaattatgagtctaggtagggccatgctgctatttgcaaagtttcaaattaattcgaacataggatggtggtggttgataaacactttgatagcagggtacatctattcgactcccaaaatcgaagctattcggacacctattttcggaaggaacgacgacaggatggatttctgaatttcaagatcctgcgttcgatccctggccatgtggaataatttgagaggtgcttttctatattttctggggtttccaccatcacaatagcccattcattttaccatcaaaacacctacccatcccacacagcgacaatgaagacacccgccaaggattacagaatacccacttgcccttcagaaacccgagatctgagttggcgagatctaaggcgagtttgaatatatgtaatagtattactatcaattattctcaacatcaacgtcagttcccatgacctttccgagacttttctccgccgtctcccactctttattaattacattgattacccagtcacccctgggtcggagtttgaatttgacctcctttggcattgtcatgaatcctgccacgaccatcgcccatggatccaccagttccccatcagcgggctcgatgtcaaacgcccacaggagacaagcaacatgcatgaaagatccatcggtagcgaccctctttccttggcagatccggcgaccctgcccaaagaccggcaacggaagatctgttcgtagtctttcctctccgccatcatcgcgttggagccaccgctcgggcacaaagtccccagtgtcgcctagcttgggatcaaataccttctcatctcgaccgatggcccacgcattggccatgagcgtgacgcctcttttaatcttgataccattgaactcgtcatcccggtccgccctacgaggaatggatcccggtgaaataggccgccaacggaaaagctcatgcataatagcgtcaataaaagcgagccccgaacgatccgagaacttggggaggcggtcgcgcccgacgacttcgtcgagcaaggcgtgcgctcgcgccatgaatgacggttggtgcagcgctgcaatgaacaaccacagcagctgccgcggtgaagtctccataccaccctgaatagatgttgcgagggtgaaagcgaggtcgagatcaggaacaccacctttggagtacttctccgctgtggcgatggcttgcttggtcgagttccagcctgctgagtccctcccatgccggaacaagcgcatatagaggtccacctgcgtggcgtacagcttatcggccgctctcttccagggtgacaaaaatgccggcaggtggcgcagaggcgggataatatccggaataccggggttcgcagcaagatgggttacctgggtttggatgtggatgatctcatgcaagatatgttcttcaaagcttgggatacgcatgccataatgcagagcaagtatgacactcgattgagtgcgctcaagcagtggatagatggtttctgtgctgattccttggggaaactgacgtgtagcatttgagagatcaaataataactgtttggactcgagctccatcaaaggatggtactgtggggcggcaagagcgccgagactgggcgctaggatacggtggtggaacttgaggtgatcatcgtagtcgtgcatcagagtaaattttgactgcccgggctcagctccggtgatcatttccatgctgacggagggcggacggttgctgtaccactgactacggcgactgaacaactccgttacagcctcatatgaattcaacaccacaatcggtatgagcccgaagagcttcggtactgcaacaggtccattctctttcgtccatgagtcccagttcaaaagcggtttatcaattggggagctatggagatcgccgattagaggaagcttgaggaggggtttattttcttcatccttttttcgtgtgacgatgtagagcagtgtcaacagacctaacaccaccgcaaccgtgataggagttgcagccataaggggtattggagtttacatatcagatgctctattgcggaggaaaaaggggacgcagtcttccatagcgcaaacatgtgcatattcggttactgtgccaagctttattatctctgttagacctcctgcaattggttttggaggccaaaacgcgctaagaaagcgatggactcgttgtgactgcataagcggcatttggcccaccaatgactgaggatcccggagactgtcggggagacttgtttctttcatcattgaacgtgacaatactcgtgttattgctagatctctcaacctcaatctgcgcagaatttaccaattactagttactcagttactacaattaatcataaaaattcaggttatctgatatcgatgttccgaaactagacgcattgtcgggcgattttggcccccacggctaccttggacatccctgctagttagctgcaggttggattcaaattacctatttaacatcgttctcctatttcgcttcgctgggttcccttcgacaatggagaatggtcgttaccttccctatagagacgccagcccaaaggcaggtcttgggcgtggctatcgctttctctatcctctctgtggcagcagtatgtctgcgactgctagctcaccatcttgcgcgtaaaaaatggacattgagtgactatttgataattgccgccggtgtgagtattcgcccaatcaactcgaacaatatctactatgctaaccaatacagattttagccgtcggtctccagtccattagcatcaccggcgtaattcaagcaggcatcggctacggccatgtcattacaattgcgggcacatatggaaccgagcccatcaccaaactccttcagctgatcgtcccattgcaatttctctgggttctgagtctcagctgtacaaagatttccatattatccttatatcttagcatcttccccgtcacttgggtcgtgcgaatctcttggataacaatgggtgtgattgtagcctggactattgggacaatcctggctggatgtctgatatgtcggcccttcgctttcaactgggaccagactattcccggaggatcgtgtggtaaccaggttacctcattcacggtgaccggagttatcaatcttattaccgatattgttgtgctggtgacacctatgcccctgctatataagttgcaaatggctaggtataagaaagtgacgtttatcacaatcttcggactgggaggcgtgtaagatttgcacaaccagtgaaagaaacacaagaggctcttgctgacctagaatatatgtatagcacatgtattatcagcatccttcgtatctccatgctctccacaatggacttcaccgacatcacctactcgattccccgtgccaacatcttcagtggtctggagccttgtctcgccgtcatcctcgcttcgatccctatgatgcggcccctcctagggcgttcaacatacacccccgaggtaacagcccacccgtcaaaaaagtcttcgcccccatctggaaggtctaggtctgctggcgatagtgagttccggccgcttcaggatgactcgagtgagctgtgtttacggccaatcgggccaaagcatgaggtcagcatcgcagttcaaaccctcccagagacgagagggataccccgtggaagcgaggactccttcgaagccggagagagcaggggtatggatcagatgcagaaaggaggctggattatttcagtaaagcaagaatgggctgtgttgcatgggcggaagtaatatcaagaccttccctagaaatttattgtatataccaaataaggaaatatatgtcttgctggtcaggcattcaattcaaaatgtcttctatggcaatgtcatagcgtagtctgcccagggactaggattcatatcttcactcccggcctcccctgtgggaatttggcttggggcctcaaccccgtgacggccagattcctctggcaggcagcttgtatcatcgttagccattgaactgaatttatctgggatggattcttactatctgctgtcatcttcgacaatgacttgttgccggtttagaagcctgggctgtgttagtgggagtgtctgtgtctgtggcatgatgttgggatatgagacagttgagtcaagatgagataggagtcaaggttgattgaaaatagagagtgaacgaggttaagttgagaagagagagcaaaggaggttagatagctgcctgtgtaggagcgtgttattattttgttcagagatctcccattgttagcgattatcttttattcttcacattcagccctctcatgtacacttcaagcgattccccagcactcagattcaatatcatcacaatcaaccatggagtcttcatccaaaacattccctgcacccgtgattggagaggatgaagaccagcctgggttctgggcacatagtgctctcaataacccatagcctcatgggcgacgagttcgtgaacgctcggggactttgctacatgcagtgcaagccgcaccacttcgtcgtgggccagccttacgcactttgaaaaattgggacgatttctattatttgggctccaaaatcattagaatcaatgcggtcaaatgtcatcggctaactttgacagaataatccaactggcagaataaatatagactaggcctaatctagctagacgatactctctattacgggggaagagcataaagagggaaacaaaggcaatggagggggaggggctcttgttcacgaccagatcaactcagctagttactaaagtagttgcttaagcagtttctcaagcagttttgcaagcagtttctcaagcagtttctcatgcagttgcttaggtagctgctaaattaattgacgatgtatcagttgattaagcagttaataatgatatgccaaaagggacttaattttattagtagtttacatacaaattgtaggtacctaggtgctatgaacgctaaacctaaatgggtcacttacgatataatgaacaaacatctcatcttctccaagcgcccggacaagccgaacagttgatgaaaaggagttcgcatcgatcgggggtagtgtaagcccaatgacactgtgcaacgaggcatatgcaagcatagaggccaagtcgcgaggtccaaatattggaataatcatgacgttctgcaatgcagaactaccagcgattaaactggcaagaacagatactacacttgatctaagccagaggcaaagagagctgaagaagaaagaaaagaagaagaagttctgggggcagggccaccttcttataggtatcctgagggcggtcggtttatgccactattcacaaataagacaaacaacgatataggctcgcttaatgtaaatggtaacgtgatgactaagacaatcactgttgatatagctggatgttctagctcacattctatagaatgctagcgatggaacaagatcaaaaagtaatgcgtctgcttgactatttgtttcaggaggaaatgatgcagtcgactgggaaaccatcccaaggttgcgcatagatatgcgctcggactacccaaaccgccacgccggagatacccaagatgcccaaggagctagatgagacacttgcaaagagatccttgctcgggcctcgcttttcttatggtcattcacataatcatgcggcgtcatactatatctatatcttacgccaatttttcggtttcttttccatcgccgggcaggacccttgttttgttttccttcccttcttaacacagacagatccccctcaggaactcatcttcctcaaacactcttgattctccttatgcacatggtgcctacttgtccaaatgactaaatacagcagaacagccaatgctgacggcagcgagaagaagccatcaggcataggtcttgctggttgatgtcatgaagaaaaggtagacaaggctctcctgcaaaggatggcaaaggagatcgagaccgctctggagaagtatccaacagttgccatttccagccttgagatcaaagatgtcgagaatgcgttgaatcttcatctggaccgaagagacaaagagcttgagcaggttactcctattactccccctccccccccccacgactcctaggtatggtattatcaagatcaaggtatcacagagctaacattttacagtggagtatctgaagttgatcgatgaagcatcgaaccgatcgccctccacggaagtcagtgtgcgctggaccatcgacgccctgctacttaatgcccattcaatcgcagcaaagcgcacacctgttgcacgccctatcgtccagagagatagctcgtacacgcatgggccggtacgattgaaggggaagttgataatgctctcggcacggacagactacggagtctggtacggtgaaactgaagaggttgctttgaatgttgtgattgtgaaagctaagaacatggattcggattcgggcgtagcgcaagccctaggctatatgggtaagtggtcgacaatatccattatagtaaaccacctgagcagggacgctaactgattcaataggctgcgtacaccgagagaggaagagtcttcataagcaggactgcaccatatacgggcttgtaaccaccggggagactttccgcttccttaagatttcaaatgactccaaggtacgtagttttaaattcgtgttagctattatctcatctaatatatatcagtggtcaacgtacgttttggatgtctattcgtgcagcctttccaggccatttggacttcttgtccacatattttgccgtgccgctgtgatgtcccctgcgcactcaaaggagagctcatgccaattccaccagcaagaggcatccgctgatagcgcccctcttgagaccgttgacaaggatgataaaatagaggactggtatgattagcttttatgtttagtgtagtgtcaattctacgcttttccattttcattttatggtgcctttttccatttgagcattgaagattatcgatagcttacgcttgtgtctgcggctcctggatgcttaaattatttcgtgttgctcagacctttcctggacctctactatgtataccaaataaggaaatacatgccttgctggccaggcatccagcttgtcattcgctctttccaacactgtggttggtccattgttctttccattcatattcctcgattgtttatactacattgtctcgcacctgcattggtttccaatttatagcctcgcgtgtcaacaaacctcttctactgaaaactatcttctccaaggaacgcttctcgagatctcttcggtaatctacatacagaatgttattcagatatcttctcgcgttggcgatccaactatgctgggttgctctcgggcttgctaaccaagacgcgacaattgtctgtttaccttccccaaaattaccatgataccaaagaaactaacaacagacagacgatcccatggatcacggatgcacctgattacttccagggctacgggggcaaggccataggcgccgtatgtatcctgtctgcctctcctgtgatacatcattgacaaccaatacagaaagatggaacaacaacctacggaatcaactgtctctcggaccaaacagcctgccacagatttactccagatctgaccgtcatctacggacccagcagtaagaacatagcagccctccaaataggacatcatactgacttatatatatagcatacgacatgattgccaacggctacagattcgacttcacctcgggatgcacgctgatgggctccccgacacccacaagcgcgtcatgcacagaaacaaagtccttgcacgaagctagctctatcacatcggccacagtggttgttccagccacgggcgacgattctaccctcggaattttcccagcaaccttgatcgtgacagacactggagacttccctgtgccttttaccgcgactgaaaccaaaccttctgccaattctcatgtttcaactagtgacgcaagtttgactgcaccttcgacagcgaccgcgaccgcaaccactgatcccctcagcttagcttcagttgggttcctgaattcgacagccatgacaactggtgcaccaacatatttcggcaatggcacctcgccggctgacaggaatggcacaacagttacggtgactgttcttgctagctctattccgtgtcactgtgaatgtgactgcagaggaattcagaccactaaggccactatcactgtcccaatagcgatgaaaaaccacggagtcaagacggctacgcccgtaggattgatgtgtggaatggtagttggcgtcatgttctggatttgaacttgagttgtcaatatgttcaccaacatggattttgccatttggatatcaaccacatgatgcggtggatttgaggaacagaatagtttgaatctgaggagttgatttacaattatccaatgtacaacataggaataaattccgccagggcttgttaaaaatagaaagatgcttggtaacgcattgataatccgcaatgcctctgctgattaatgagatcggagatttgtcaattccgtccgaggtgggcgcggcactctgattggctgtgattggccaatttactccgagatggagccctagagatggcgggatggagaaagtgatagaaaaacgacgtggatttatggatttatggatttagggattcgcaatccacattatgtataaagcccccatcccagctcacctgctatttttccttctcggaatcgctctataccacttcaccccgctcctaatccacctgtctaccctcaacaccttcaaaatgggctccactcaacccgaattcaagaacgcggctacctccactcttttcgagttggtgaaggctcgccgcacatactacgaccttaagggcgagagccccgtctctgacgatgtcattgatcgcattgttcaggacgccgttctccacgttcccagctctttcaacacccagacctcccgtgttgtcctcctgctgaaggaggagcacaagaaggtgtgggatatcgcccttaatgctctagagggtctggtcgctgctggccacgtccctaaggaaaccttcgagaattccaccaagcccaagctgaatgccttccgcgctgcctatggaactgtatggtcaccctccccaatatgacaccattccgtgtcaaaatggcgaatcaccagcttacccgttaacacaggtccttttctttgtcgactatgagtcgcttgctcctatcaaggagaaattcgcgatctacgccgacaagttcgacccctttgccctggagtcgaatgctatgtctcagtaccttggtatgtgctcttccccggcctttttgtagaaacaagtgggttggaaactaactatcaccaagtctggactgcacttcagtctgagggcttcggcgccaaccttcagcactacagccccctcatcgatgagcagattgccaagacttgggacatccccgcctcatggaagttggacgcccagctggtcttcggtgttcccaactctgggcccggtgagaaggccttcgctcctatcgagggccgctacaaggtgttcggcaaataagcacatatagatgcatgcatattaatttagcaatctagcaatctagcatttacgaatgaaagagcaatgacttggattttcggtttcaagacaattgtgcaaatctcaatagtaggccgcactacgtagtccaaccctacctcagcaaggaggatctgcatgctcgatatgacgtgtctgcatgtaaggtgatcctgatcaacaaagcttagtcgaacatccaacttcatagagtttgagaccctgaagatcaagtgcagatcagaagaaacctcacagaaacctcaatgatcgtcacatgggcaggcacaaccaggttcggctctggtaaaaaatccaggacctcgggggttgtgcctgattagtaagaatgtttagccaattaggaagcaggcgcatatttgacaccaccaggactccgtatacagcgctatagttaacaagatggctatttcccattagttagccttaaggatttacctactctagcttctgtttcacaatgccgagatttcgggtctctcgagctttttacgagtctccccgatcagctcgggaatagcggtctgacaataaccgaatattagcctgatgcaaggccccgtggtgtaccttcggccacggaattcatattccgccatgccgtgcatccgattggttgaaaaatctatagaaagagattgggcatcaagttatattatcaagtcaattgcagatgatcaaagctgacgacagtgatatacatatgattcgcaattcattctctagtggcatccagcattccaaacataatcccgagggtagatcttgtatcttgcaattgattgcggtattgtcatttttagatagaagcgaatagaggatctcaagggaattactatctgtaaaccttggtggctgagaagaaattgctagaaagaagtataactatgtcgacatgactatatacatacctgtcgttcttgaaacacaaagtagatccactatttaagagtatacgcaagcttccgcaagggattccgatcaccacgatgtcatgaaatatcgatgtgcaggaggtacattgtagattgtacgttgttgacatacatcgatcatcgtctataccttgtagtacaaagtaggtgcctgaccttatctttgtggataaaatcgaaaactccaccaactccactccatctgatcacaaatttagccgtttttcgccttcttctgaataatttttcttctcttcttcaacgcctcagatcactcatagtaaccttagaactatcgtgtctctgacaagttgaaaatgtcaaatgaaccgcatgcgggtgcagacccccaggccagcgggtctcaggatctaaatattacccctccacaaggccaagatggaggagactcagcgccagcatccagccggtcctcaatgtcctacacaaggacatactcaacaccggcaaccggggcacaaacccccgatccactgatgggccacaagatcgtggacaaaatcgccctccaagacctctccatcaatgatctcaaccgtgaaatcgagagctatgccctcgatacaacaggcaacatgaagaacagaaaacttccagactcggtatcccgacctcatcccggcaccgatgaagaatcgggatctccgattcgcagcaagcaaggcatcccacccgagctttcaagcttcacagccgaactggtcttgatcttcgtctgctcagtaggtctaatgctcttctccttcctactgggcgacgtgctcgcaccgcaagaacaaatcaaagcagccctgggcatcaccaacgccgagcttccctgggtcatcggcgccttcaacacagccaacggcctatcggtaatcatctccggctcgctaacagacctactgccaccaaagctcctgatggttggagccttcgcctggctcgccatatggaacctaatcggcgcattcagcctccagccctctcgctgcgtcctattcttcatcgtgcgcgccatgcagggtctctccatcggcgtcctcgtctcaggaagcatgagcatcctcggccgcgtctatacaccgggtattcgcaaaaaccgcgtgttctccgcaatggccgctaccgccccgctcgggttctccctcggcgcaatccaaggcggtgccttgtcccgtcacctcccgtggatctttggctcaaacgccattctctccgtgatcttgtgtgtggctgcctggctcgcgattccacccctccgacccatggcagatgcatccggtaaggaagccccgtcgatcaagcaattcgactacatcggcggcttctgcgcggccggcggctgcgtgtgccttttgttcgggctaacgcagggccccgtggcatcctggtccccttacacgtacgttttaatcatcgtgagctttgggctcttcatcgggctcttcttcgccgagcgcaatgcagttcgccctctcatccctaaccgcctctggcgcacaccgggcttcactccgttgatgatcgcgtacttccttggcttcgggtccttcttcggctgctggcagttctacgcaattcagttctggctgcgtatccaacacgctagtccgattattaccgcgctgtataatattcccaacgcgctagtcggtgtcctggcgacattgattgtcgcccgcactttacacctcgttccgggtcactatatttacgcggtatctatgctggccttcacgttaggaccggcgtttttcctgccgcagactgccaacaccagttactgggcgctttcgttcccgggtcttattctggtaacattcgggccggatcttgctttcgcggcggcttcaatcttcattactagtaatgttgaacggtcctatcaggggagtgcgggtgctttgttggtcaccaaccagaacctctcgtcagcaattctgactagtgttgccgatgctattgggacccgtgttgataaaggcccgtctggggaaattggtcttgatgggctgcgtgctatttggtggtttggcctcgcggcgcagttgctcgctgcgttgatcacgattgtttgggtccgaattccgaaggaggaggagaaggagcacgttacttgatttaaatattaccttgtcattagatttagaaatacatgtcttagatcatgccttagatattaccccttccgctctaaaagccatatctaattttgcagtaataaaatcgtttcatcatactactagagctcgatatatgcaaataataaaaagaaagacttgtcatttagccacccgtcccctaaatatatacatcaaaatactgagcccaaaaagacatgttgccgccaaagtatgccgcctaaatgagatcgtaaatattaaacaaaaataaagaatacatgtatcgaaactaaagagaacaaaaaagcatcaagcatccataaccaccttatgctcactggtactattcttcggagttgcctcctgcataatactcatgctcatctcggtggtaacctcaataccgccgagcgaaatgtgactggagtggtcaccaagcttaacattgatcgaatacatctcatagtccttatcgtggttataagtaaacatctgagtatggtgtgtcagagcgcgagttcccgtgaggtttgtccctgcggatttattggcatagggattcgagctacctccggaaagcagtttagggaagatgcggctgatgataggtcgcaagaacgggagacaggcgcacatgatagcgacgttgcattctgcggcggtccaataggcggctgcgacgttgctgtctgttcggtaggttagcttgaggagtcgattggagaggacaagaagatgacatacaggaagtatcggggctttttgctacttcacgtaaactagataggcggagaatgctggtgactacaaccaagagacccatggcaaagacacccattaaggcgatcttctgcatgcggggcagctgtagcttggaaagtagcggcatcggcaagactagtagtgctatatcggttgcaatattcattgaagcattgaagaaccagacagcctcgaagctgagacagctgcctggcaagtccttgttccaaaattttgccacagggacacagtccacgaagccgctcacaatggcccacgacgagtaggcagccacgattgctatcatgacataacaggcgaggcgaaatcttttggcagggaagatgcgtagatattggaggagaatggagaatttgctgaatgccaagctggcattgtacatagggattgcagcccacaaacactgagaagaaagtcaggttatttacactaacaaagaaaagaagtgaagaataaagtgtaccttgagttgttgctgtaagacatgactggaaagtagtgccgagtggacacccattttataatgtagttctatcatctatattagtggggtggtttctgaattcacctctgcactatgaacgtacgggcagcgacgagtgcaagatagataatggaaaatgtctaaacatatgttttattagcgagctgatcatctaactccagacgtggcttcaagaggcataccaaagagaccagaatagcccaatcttcacggccagcaattttcatcaatccaaatcgtgcatacaatcgcattccgacaatgagaattgaaatggctgttaggactgccgttaccaccaatgcccgtcggccatgagaggccccaccatcatcatcctctcgaggaagcaatgtgtgaattgaaccgtgcatattaaatatcgaagtcaaggaccaaatatagcgagagtagttaaaatgagctcgtggctatttgcagttgggtcaattgatcatgtccagcaagcgtagtggcctcggatagatgcagctcactgcactaaaattgggatcgagagtgctagtaacgtgggtgatattcgaatagaaaacaatccttctcggagacagtcgcagagacagggagcagggacaaactcctttgagtatgttatccaagccaatcattgtctgcacaaagcgcggagaagcatttgcacgtggcattgcccaatctgggtagtcgattcataggaaacacccctatttcgagtagtttctctcaatagcgccacaccagccggcggtcctatgttccaatctaggtcgctagaaagctttagtcgatgaagcgataggtccagtatatgccgtgtaatgtgggggcttgtactctgcagacaaaacttccacacaagcgtttggcgcgggaacctggtcgccgaatctccgccataggcagggattcccgccgaacaatgttgcgaggggctcactgaaaggggtcaggattgacatgtgtctgctaattccgttataggaaaccccagctatcatttcaagtttcctcgttgggaatggaggttgagaacggggctctgtgtcggtacataggacccacttgggtgggtatacggtgcagatgtcactttcctgaagaaaatttagtgcaaggtggggttgcattggcgtagtgccgtcattctaatgatattgtgttgcaagccggatgacccgaggtcaggactggcagtgttgtattgcataggcatgaattgttgagacattctacgtgtattgcgagagccaaagtagagcatatgcattagaaacaattcatgatcgacattggacaaaggacctcggtacggagaaaaagggaaagaaagggagaagtaggatcgacagaggatctcccgcgccacttcctaatccggttagggtatgtcccctttattccaaggtcgctcctttattttgatctccagaactattcaagtcttgtacttcagtattcagtactccgtactccgtactccgtattctatactggaataattcatgatgttctgtttgtccattcactcgactgtttcctttgccatgagagatcatattacaagtcagccgtcagacatccatagatggcctcgggagtatcttcttttgcagtccctgagttgtgaaacaaagcaatgatcgccacagttcaataatgaagtggatgacctccacgcaaaagggtcatgaagcgaaccagcgcacagaacttgtcatgactttgcaaagtgactggctacggagtattatgtactgctagacgctgtccacagctgcgtcacttgcatattcgctgccttgggatattttgggatgcacggacaagctgattgaccaagaaagactacggattttgttcttgggtgcagtcccccggatacaatatacgattctggcgtcaacccatagttagaatatagaatatggccggtggaaaagttgtgaaacattcaaattgacgtttccgtatataccatgtgattcaatagaacggtaagcatctgaaggtggctagtcgagatctaccttatagattcattgtatcacaatcacttccacttcggaggctgaaaatcccagactggaacagtatttggccccgtctattgtggccatatatgtcatatccaatataccctctcaatctattctccagacagctcaacaacgacctccccttccctcccaagctccgcattaacagccgtccccaaattcgcactgagctcgcggatcttatgactaacccatccatgatccgcatctccagaatccaacaaacgagcctgaaaccgctcaactcgcgtagggaagatctccaacttctccaacccaagcccaccaccacccttctcccgaacaacaaccctccacaaagccccaagatcattcctatactccgtattcaaagcataatcatccacaaagtccccacaaccatagataataagcttcccacgataaacctccacgccctgaacatgatgcgacgaatgcccatgcacaatatcaaccccacactcatcaaccaagaaatgcgcaagcgacgtaacccgcgcatccggatgccaagcgtaattcggcccccagtgcaccgaaaacaccttcaacgcaggcttcgtcgcctcagcgccaacgagcatttcccgcagccgagcgcgcgtgtcgcgcgtgtagtcgaacagattgaatcccggcacactgatccatgcgtgcgggtggtcggtggctgagtatatatgcactgtgtggcggtgttggctttgttctatgggctctgaggccctgggcaaatatagcactgcgggcttgcgcgcgccatcggctgtttcgcccgcgcctgcgtgggcgatattcgccgattgtagtgtttgtaaagtctcggtgagacccgatatgccgaagtcgagggtgtggttattggcgagactggcgtagtcgacaccgccggcgtgtaggatgggacctaggtttgctgggtgcatgcggtagttgaatgccttgttgggccatggggttggggctgttgtcacggctgtttcgaggttgatgcatgctagggtcgaggagtggaggatgcggagggctgtgccccatggcgaagtgggtgtgtagtttccttttgagaaaaaggttgggtgggcttctatgaaagttttgacgacgcgttcgtcctgctcgttggtgacgtgctttggcattagttggtcgatcaggcggccgagcattacgtcgcctgtgaaggtaagagtgaaggattttggagtggacatagtagagatggtcagtttgaagaattgaaattggaattgtttagagcgtattggatatatttccaattgagttgatcgaggttggatttggacattggatcattatgacatcggtcttcatgaagttcaagcatctacttgtaggcatttgaggaacacgtggaaatagatatcgttttcatattaaaatacaattcatttgacacacttttttaagaataataacacagccagggataggatatcccagtaacgtgagtggtatctttgtgcgccgttgatctcacgagaaacaccgattggcaaaacattatctgaatatcattattttcatcattgcttgggcggcgtcgaatctatcgtctcatctctgccagctcgcgctcctttgctctgagcatctcgcgcatctgctcagcttcgcgttcaagtcgggcacggcgatcaaccgagtctccaagagatgcaattccaggcaaaggctgtgacgggtgaggtgaaggggagatagaatggtgaataggaggtggacgtcccagattggtatccgagcgaggctcgccccgaacatctgattggttcagaatagacgagatagagctgagacgaccggggggagtaggattggccgaagacataatcggaggcagttggttggatcctgcttccaatgtagatggagcgggtagagcctctgtcgcagtctcggccaatgttcgtttcttggggaggttgatggaatttggagaggcggaccgtcgcccgtactgaggcgcgggcgaatgccccagccgctccacccccaaaggtttaggtaggccgtgagagatggagagaccatgtgcaagaggcacggatgaaacattgtaaccagtgaaatcaaccggcggtggcgcaaaatgtaaaactcgaggtgcgtcttcggattttccaggcatcatcgggtagtgatccgtaggctcgctgctcatatatcgatagtgatcatcatggccatgcgccagggcggcaggcgatgcctccggggatgccgatgagccattggaggaaagggtagcagcggtgggagactgatctcgtagggcgggaacaacccgtttgcgacgtttgatgatggactttttcatgttggtggggcgatagcatccatggagcttataatacaatcctgtcttgtgttagagaaatcagatcatcaagtctatatggaaactcaaacttaccacaagcgttgcaaatagggtggccctgttcatcgcgcctccacagaggagtcacagtcgtgccgcaattttgacaagcaaccaatgtattagtgccatcggcagaagcaggggccttcaccggtggctcctcttgcgtcacaggctcaaggtcttgtgctgggttacggccccacgaagattggatggcagccgctccccggggggcggacttgtatatccggttgttgtatgccgggcatccatcgcatccttctgcgccaccggtgccattacaactcccaccgccagggcatgaccccttgcaacctccttccgaggaaccgccacagtgagaccgcataggaggcggtggcttctcggcaccttctgattgcatccgatttcgtttcgtggggcgagcgacattgcgagctttgaggtagagaccgcaggcgttgcagatcatggctcccgtgggagaacgacgccaaagaggagtactttttgtgccgcaattactgaataaaagagacggggtcagtctttatagcctaagtatcaaccgaggcccagtcgaaactcacctgcatgaatgccctagaaaagttgtgtctttttggctgccgggggatgttttctcgctcgggatttcgttgtgtccaatccattgatttgatccagattgacccgatccttgccccatgccatcgtcccggtagtgatctgctagatgttcacgacctgcttgtgctgaggagatcaactgctgcgcagcatccaaatcctccgcggacggttgtcgcattggaacgtcctgattccggggtaaagagtgaagcgcttccatttgtgggatggacgctaacattacaggatgtgatccgggccaggaatccttcggccgtgagtctcagtacgggatgatcgaatatgaacgaaacgacaaaaacgaagggggtgataatcctaggatgtgagggcgatgtcgcaccacagtcgagagcagaatgcaccgtatcactcaaaaaccaaatgtcggtcaagctgacgggttggagaaatatgggaaagtcagtccagcaggcagatatgcagccacgatgctgcaggctcggggagtcgcagggcggacgatgactcgggatcgcggtcgaaaagaagtgaagtcggatgctgccaacctaggagtcaggaaatcgagtggtccgagtagatgaaagtagttgacccgccaccaaaaggtatggagcggcctgtatggaatagtggcgacccgacggcgtggaacagtcaggtgatggtgattgcgacaattgacagcacaccacagggcctggtctgactggcaggcgatcgtgggggacggtttcgttcggggacggtggcccgatgcaaaaggacgattagcgaggcagggattggctaaaagggtagggagctgcaagatggtgatcactccgcgtcactgcaagcgggcacacaagatgtgatgggagcgataaggggaagttcgagggatggaagagatgtcaaagataagtgggaaaccctaaaaaagattaaaaggaaaaggagagaacccgagaacaaagaggcgagaccgaattgcttatcgccgaggaaagggagggttggggtttatcgatctaaggtggaaggggaggatctacggcatatcaatctatcacactttatctatcgtttgccgaggatcgcatcaatctcatctaatcatgttctattttacggcgtacttttttgcctaggggattcgctatcctaatccccaaggaaatctctggcggttctgcatgattctatgttcccccaggattgcatgttgactccaccgtatggcctgatgaagtttagttggaaagtgaaaaattacagtggaaaaggtgggaaacggtggtaaaagtggaaagagtgggaattacacatccccaagtgaggttgcggtggagccctggtaggcaatcagatatgtagcgcctcggattggtcgcaagcggctgactaatcttgtcatcaacactctagcgattccgattggccgctcggagatggaacaagccgaagcgatgtggccacgctggactttgggatacggagtaaatctaggaccgtccgcggacgacaaaagtacaggcttggccccgaccacggagtaatacatcatcgtctccgtgtggtcggtacatatgccagtctccacagccaagaagtccctgcactagttcctttatttatcagatgatctctcaccggcttctccaataagaactcgatcaatcattactccgtagagcatgccaatgttgctagataatgctagcccacgtccaaatatagtacacgtgtctctgtccctttacgctggtatcaacaaaaatatccgagatccagcagaatcgcccattctcctcacattctctgctttataatgacatccttcgatcaaatcgagatcaaggacatcccaaggtcattgcgctcatcgaacatcgcataccacatgctggaggaactgccggaatagacagtatcccaccacagtgtcaatgcgacagaagatcgtcatcgccgcctactcgggcggcaatttagacctgctcggcaccccagccctggtcagattcgcgcatgttcgaaggaggctcgatagatggaatgaactccaacgcgacgtatccgagaccgatgaaggcaatcaccgaaccatcaatgatgcgcaacacgttgtcgtgcagcaggatggaaccgataaagatgtagactgttggcgcaagtgattagccaccgaattccccctcggatctgcagacatgcaaaggtctaacttacagacaccacggccgaggaatgagaagaggaacgacgcataacggtacgcgtagtccggaacgtgagggaggaactccagtccaccaacgactaggataatgttagccttgactattgacgttgcgagttcggattatcgtggggacctaccgagaccgaagacaactgcatacgcgcccaggatgaatgaactccaggtgccggtgaagaagttactgatgccaccgagcaccataaacacacccacggcgatgttgacaatacggctgcataggatcagtactggcgcaaatctatcatctctcacgaagagccaacatacaagatgtttgtgaaatccattgtgtgcttcgttgaagggtttatgagatgaaagtgatccttgggtgctcgcgaatcagtaatgcggagggcgggtcgttaggctgccaagtttcgacaaaggaagattcggtgtcgggtgactaaatcgggtcttcaaaggtgccaagttagctttgacgcgaatatagataccgcttggtctcgccaatcgctcaagtgatgacggaggtcagattcgctagagttcggaactcagtttgctggtttggtaacaaagggaaacgcacctttgagatggaagagtgggtctgagggaagctataataagcaacacacgtttgatcaaaaggctggctagtgtttgaatgaagcagaacaggggaaagtggaaatgagggcgtcgacagctgctgcgctgtcgcaagcagcgggtctgccaaggccactggtagctcacgtgatctggcaccggccagtgcgggtgctatgctgtattcggtatagtgtttccttgatttcttgacatcgggcacttaggtatcattgatacctcgaacggtggatgcgacttgatagtaaacgttaagattagtttataggatactggaaccccgagctagagaagtgaaatagggaagatccagagataaaatgcggcaggaagagagagagaaaacgacggagagttgaagaactaggaaaaccaccatatctactccctatttttcactagttagaacaagatggccaaaatgacattgcctttttatgttgcgagctcctgacaaatgtctagtaaagagatatcattatcttagattaagttctggaatacttgttcgtgagggaaagaccgatgattttgccattcttctcgttaagacccatggttatagtatgcattgtcaaagttcctcaatcacatcctgccttttctccagtcggacttcagagagaccattggcgaagcgactcatacgcacggggtcccgctctagcacattgtatattttacccaaatcagttccaatcccgatctcagcagcagtcttcaagctccgcgaatcgagacaaggagcaatgcttggccatatgccttgaacattgttgaaaaatacctcgactgccaaatcacccatgcccctgacctccttcagcaatattctagctttgtcgattttgccagctgcctgcttgaggagattatttaaatccccatctgtactcatacgacgtcagactccacttccacgtgcagtataactataacatcgcaaattcacccgcgcagatagaagcgaggacgtaccgtatctctcaacaaccagtttggcgagctcgccgagattggtggcgcactgctctcgataccggttgtaacttccttcttgcaggacctttgttcgatcttcccatgtgcttttagaaagtacgtcgatgtcatggtagtcggcttcaattagctttttgatcgttctctgtgtcaactcgtgcgagatgggccttgctttgatcatggcgtccagcaccatcgccaacactacctcggggctagcattttgtgggtcggcaagtactgtgccatgtagaggaggtacaccgaactcgttcaggattttgttgattttatctgctgcttccttggtcgtaggcgctgacattgtggagaaattgatgaaacgattataatggagttgaattattctcgggttgagtctcaaatcgagtgtttcaacaatcatcaattgacgtcatgatggcatgtacgggccaaccagactttgcaaaattacatgccgagactaaatttccgaacactgtacaacaattgatctatacaacgcgtttcctcacagcttagagcgagatatgttctgcaggacctccttgaccagagccacggcggtatatgcacagccgaaggaggcctggtagccaaatcctccatgaccatagttgtgaacgatggccacaccgtcaaccttgtctttttcaatgcgagtgccaccttctctcagcgggcgcaggccaacgccgtggcgaatgatatccaacccctcaattccctgccccttctcaacgagatcggggcagatgtcgacgcaacgcttcatgatgcgattggcaaggttcatatctgggattccattccagttgtgcttctgataagagccaccgaggatcgtgccgccacctagaagcaataagccaacggtcgaacaataaaaccagcacatgagaacttacctgcagcacgagtcataatgtacaacgcctcatcttccccgtcgtcggtcccggatatcgacatcatggggccggggtcgttgcggactacgacgatctggccacgagcgggatacatcttgtcgtcgagaacaccaccgagagtctttgccgacaggccggtgcagttgaccaccacgtcagctttctgtccggtgtggtgggcattggctgcgtcggcgatatgcttaaagacagctcgtttgaacacggcgccgttcttgacgcactgaccgaccaaccacggcaggtagacggcggtgttgatacagacagatacgaattcctggccgttgtcaattccgggggccaattgatcagaagggaggtttttgaactatcatcatcatgtcagtctgcaggcagtctatggcaccatctcacggttcaaacatacatcaagcacgacatctttataccacgggtttggctgggtcaattccgagaaccaccttccggtgtctgtttcttgatccttcttccggttgtagatcaaggtgtctacattctgttagagggtctgcggatgctgatcaagttctgggccggtatcatacctcggaagtggatgccagcttctgggtacttctcggtgatttccttcaatgctggccaggtatcgcgctcccatttctgatgagcacttccctcttttcccaccctataaaacatccacttgatcagaactttatcgcgcagccggtttcagtcgatcatacggcatatagttggcaccggcccatggggacgcatattcaatatcatagtctccaggcatatgcttcgccaaaacagtaatcttgttggcggggtcttgcgacagcagatatgcggtggtcaaaccagacacaccggcgctgttacatccgttagtagaggctcgaagtgcggtccagtagaattggagctagagaacttgggaggttgatcttaccccagaaccacaatgttgttagtcataatggacaatttgacctggaagttcttaggaaaacacagcacaggtgactcgaaaggggcccgctgtccttaaatgtgggctaagacgagcggggtgaggggagagatagctggttgtcccattcagctgataagggttgccctccagggcaggtggacacccgtggaccgggtggtctgattacctcactttgtacttggccaattgcgggaagtgctaccggggcggtgtaagctttatccaatcacatgccaccaaaaaaaaaagaaataaacggcctgggaactttcagtggagacacggcggtcgaagatttaaaagacaactccgcacttatgcggaggtgatgtgctcctggtcaaagcattggaagcattgttgcaacggaaatctaaagctttgatcaatctcaatgcttttgtttctgaactctcttagacccttgatttagtcttaaggtatcagtgacttcgcctggaccccagcaaggagctccgtaaagtcccgctccatcactccggactccactccgatcgatcacatttgatcctagggctatatgccagggctcttcaattacctcaattcgtggtcagtgttctcgtaaatgactctaatttgagatattttcgagcaggaacacctggaagaagctttgttctgctaaatatagaatcgaatgccctgaagccttgctatacaaagaaacccgagcgatgtcatagtgggcaaacgcctagttgtggccaatcactgagcattagggctcaccgccccgcccccaacactgaaatgggcatcgaagggccgaacaatttcctttttcaaaccacccgcagggcccgaattcactcggcgggctccttttgtttgccattcttagatcaataacttcaatttttcaattttctccatcttctctcccttcttgatcggtctatttgtttagccattcctctatactcccataaatgccgacccttattcgagtgttccctccaatatgtcactcgtcactaatggtggcagaatcgtgcccatacttacgggctctgattctcgcgatcccaccctcgaggtgtctgcgttgttagacggatctcttcctcccatccctattactccaattccttccacaccgaccacgccccgcctgtcgcaggaccaacaagcttgcaaacaggtcaagcccgtgcaccatgcgagcttagaaatgccctctctccaacaaaggggcctttatgcaatccccacggagggagatggtaagccaattacacttgttgcatgatttttgagctctatagtggtctttggaagctgcaccgcgttgttttacttattctgacgcgtccaatcgcaggcaattgtctctattactccctctccgaccaactgtatggcgacacccaccatgcagacgaaattcgacagcttcttgccagtcacatggcttccaataaagattacttcatgcaatttgtcgttgctgaaggtggggagcgccgccgccctaaacgtgcggctgcctctgcgtatgctactcgatctgccgatgtctctgctccctccgaggaggacatggaacggcgattccaaggcatgattgctaccacccgtaagaacggggagtggggtagctccgagcatctccaggcattttgtcaggtcttcaaggtcgacttgaatgtatacaccatggatggtgtttcggtgttccaggatgtcaatgccctcccaaatcaatatcgggatgttctgcacgtagccttccatgtaagtgccttgctgttgtacatgtcatcgagcgtcgtacaatgtcatcaagccactaacgagcacaggacttcaagcactactcttcagtgcggggtatcgagggcaagcatgaagggcttcttaccaagctaaaccctctccagcccttcgaggagggaatcaagtccgaggtcgttccagactccaaagccgacttcgatcatgaacaattctcttcacaggaggaaaaagccgttgatagttatacaaccaacgatgctagccttgctgttgacctatatcctccttgggatatcaaaactatccaagaaggattgggtggccgatatgaccgggagaccattgtgaacatgctccaaagatgtcgtggtgacattgaccgtgcattcgccgcgctcctagacgagaagacagacgtcctatctgataggaaagctgcccccggaattcctatcaaaccaagcttgcaggcctcacgctcttcttctccattcagcacgggtagcaagcggtccgcagaagacagcgacgactctgaagatcctcgtcccgcgcgacgcacccgacctaagaaacggctcctttccaatcttaccttaggcgttggtatctcattcagggatgattatgacgaggttgtctccttgaatcttcgagtaagttctccaaccaaaggtttccatatgggatatttactgacgtttcgttcaatagatgaactccgacactgaagacagtcaggccacagaccgcactcccccgggtaacactaacccggaacaaccggacatgggcgagaagaaatgtcgtcgcagtagacgactttcccgcccgcgctcgagctgatttatttgtttcttgccattctctggctagacctttgagcatctttagcgctttctcttgcatcgaaaaaaaaaaaacggcgttagtgatgaagcgattagtttcttgggtttgcatattgcatagccctgcggggctcgcggcctatgggcttgcggaaggaggcgttttgtctgattatgaattccatggggtttttgcctggggcactcctcaacgatcttatttataacgataccagggtttctttctccccacttcttttagagtccttagctttagctctttttcggctctcttgtttcagtctgggtattggcccatatccagcgtcggtggcgagctgttttcacagctctgtttggtggcttggattattatacagctattcaatgtcacacccactttctggctggactctgtcggtcgtactcattccctaggcccttcctagtgatatagtgaatataggtgtaactcatactttggataggttttactccatgtaacagaacggacctaattatcattctaaaataccacttcaccgcctatcactatgtacatgtatgtatgtaggtattgcgaggccgtcgtctctaatgacattcaatttactatcctagtgcgtgtcatgtacatgaagatatatttatttgatactagtctaaaagaatgtctaaaagaacaccaagcaggattcggcagagagccgggcagaagccaaaacaaatctaatgcagttcgcttgtgttgcatgaaatatgtatgcgtgcctttagtcctccagtaggaacttcaggaacgccaccccaatggcgacaccatcatgttcaatattagctctgctcaaagcatcttgagcttgttcctccttgaaaacaccgccctcggcccgagtccggataatctccgtgatgatgtctcccgtgaattcaggatggccctgaagagtgataaagtggcgcggcacatacataccctgcactgcgcagcgcggggatgagcccagaggaaccacgttcgggggataattaaatacaatatcctgatgcatttgctggatgcgctatttgcgagaaggaaaggtcaggtcaagtgtctgcatatggactcgggtgcatgggtatgtatgtatgaagccttgtgttacacatgacgcaggcgcagggtactcacgatcttatctctcccaaacagctcctttcccttatcggtcaaatccatatcacacacggcaatctcccaaccttggtcgcttcgtccgaccttgctgtttaatgcgcggccaacgatttgatgtccgaagcagatcccgagtaggcggacccgatcctgcgagagaacttgttgagtgaattcgacgagacgattgatccagggaatgtcttcgaacgagttgtgttctggcttatggttactgtgattagtgtatgcattcaatgctctgggcctaccgtgtcaacacgcacttgatcctgttagaagcacggcatccacgtcttccagcttcgggtatttgtcgtcgttgactacatcccaagctgtaatttccagtcctgtttctgggtcgagtctttctggctcgttcaaggcgttgacactagctttgaggagcgcgcggaataccccgccatatccattatagcggcggttgatgctgtcaaggggagtgtcgcattccaagacggctatgcggagcgggggttgcattgttctggatgatttgaagctgcaaacaatgtgatacagttataaaacaaaaagatctagttactccgtagcaattggagaaagacgagacaatattcccttatcttatcggaccccgagatcggaccctgctgaccaaccacgctattcccgatgtggcaaacatctacaaagtatgagccttcagcggatcgcccttttttacccctcggcaatgcaattgatgctgtgttgcatcaaataaaaggatcttgcagccctagcgttggtataaatatcatatccccatacgcccggattttctctcttttttcccttatttttgtgtcaccactgctttcgaaacccatgagccgctgttgatggcgttcgctgtaattacattgcgtgcttgcagaatcttcgtcctcatgaaataacattttcatacatttgtcttcataaattttttttaaaaaatgcccagtgacaacgaggggcaatcatgtccctctgaagccacccctctcctgcgcaagaattcggtccatcggaaaacgagttatcacgatgtctcgtattctgcaacggatgttgaatcagtctgctcatacagagatacagaagaagaagaagccaacgttcgctgtatatccagtgcaagctctgccgaaggactcgatgttggtccggcttctggggctggctcgcccaaccaacagccgaacatctcaacccaagatggggaggattacgcctcgagattcattgatatatcaccgacaaggttttggatcatctttagtggtatcatgatgggctacctgatcggcttctttgactcaacgctcatggcttcaagccatccagtcatcacctcctacttcgaagcagccaactcagcctcctggttatcgacggcctttttgttgacatcgaccgcatttatgccgctcttgggacgcatctctgacgcatttggccgaaagcctgtctatctcttctctatcgccatgttcttcctcacgacagcaggctgtggcttagcgcaaagtatcggcagtttcatcgctgcccgcgcgctgtgtgggcttggtgcgggtggtatcttctccattggtcagatcatctctagtgacttggtacgtctcgagtatcgcggtgtctaccaatcatacatcaatctgtgtctcggcatcggcggtagcctcggccttgcctttgggggttacctgtgtgatcatatcggctggcggggtgcgtttctcatccaactgcctttcatcttcgtttactttatagcagccgcttggacagtcccggcagatctcggcattaaacaaactggaatggagcgcatgaaagtctggcagttagtccggagcatcgatatactgggatcaatcatcttgattatatgtgtgactctgttgatcatgggtctgaacttcggaggcaatgtctatccttggagccatccactcattatcatctccctggtgtcatcgttagtcctagcggttatcttggtacgttacgagctgcacgttccacgacccgtgctaccaattgagctcatggcaacggatcctcgagctagtatcatctttggcaatttctttgcctccatgtctgtacacaccatgctgttcaatgctccgctgtattttcaggcggtgaagctgaccagcccaactgcttctgggctacgccttgtggcctcctccatagctgtgactatctctagcgtgagcaccgggttcatgattaactggaccagacgtctcaaaccttatgtcatcatcggtgtatgttgtatggtgataggtggatgtgcagctgcatccatggggattgacacctctcaaccactctccatgatctgcatctcattctccagtctaggtcagggcttcgcatttcccagcttgatggtatctatcctcgccacgagcgagaaacaagatcaggccgtcgcaacaaccactctggggctgtggagaaaccttggcgccgtgatgggtgtggctgtcagcagctggatctttcagaacagtctcatataccagcttaacaaaaatgttactggttttgagaagaaccatatcattgcacttgtccgcaaatctgttgatactatcgctcacttggatccaatccatcggcgagaaggtgtgtctcatccccttggaatgccgatttgatttgctaataaccacccagtcactctatcatattccgccgctcttcaactgaccttcatatctgccgccttatgggcagtcattgtgttaatattgttgggtcgagtccgactaccgcggttggggagaaaggcctagacggtgtccctgagatggttcggtattttgacaccgaagattgcatattggcttcaaatctcagcatgtttcggataaaatgtgttataagtattttaattctgactgtatttgtttgagttgatataaattatgtatgcgtatactccgtactcaaccgtctccgtatatcggcgatcttggcaatgcgacccacctttttttcttgacttctttaacttgacatccacttctccgcaacttgagaagtctgtgtggctacataagcaaggggccagtgagtatttcatacggtactttcacacgaggaccataatcctcagctgacccttttttgccccaggattattcgccgatcccttcgttcctgcccctcctgtgccgccggctggtagattcaaatctacacctgaatatcagatcgaaatcctattctctctatctgaacctcctcttgccagtcaacaacgaatatggccatctggttagaacctacaacggcatattgtgtattcgggaagcctctatcagttgggactccagttggcgccggggactagaaacatagttgcgctcacaagagcaagagctatcgcaatcagcaatttatcaaggaaatatgaacctccgaaaagaagcggagacgcagccgcagtcgcccagcgccagcacgaggacatccactccaaaaagccaggcaagcgattcacaaagcacaccccgccgctccagtcgcaagaaatcctcagatgccccagataccaaagctaggagggtacgcacaggctgcctcacttgtcgccaaagacatttgaagtgcgacgaagccgtgggacgatgtctcaattgtcgcaaatcggatcgcatctgtcgacgtggtgtccgtctcaatttcattgatactcaaactgtggcgcctccacacatcatcgctcggccccacggatcgaaggtgacatttcgagatgactcgcgtttgatcgcgtctctgtatgtgggaggtttcgagatatacccacccgttcagccagagagtcctgttcaagagaaccaagattcgccacatgactttgactttataggggatgatgatttgacaaatctttttcaatcaatggcacattcgtttgacccgctgagctttgatatcccacacccaaatgcaacggactttgttggaagtgatacttggcaccagtctcacttggtaccaggagatgaacttcttccgcacgggacgtcaaattttgcgcgaaaactggctgggaaacatgaatattatccttttctcactgacccagagcaagtatctcttctcagaacattcatggaagaggtcggtccccgcctggatataatggatgaaatgaaccatgtgagtaaaattccccacattacattcttacaatctgctcacaaagcgcagttttcccagattcttccgggttttgccattagtgagcccatattgctcaaggcatttcttgcgtgtggtgcgagacatctttctattgtagacccttcttacggggatgaaaaagcgacacattattatgacgcagctactcgggatcttctgaatgcggtacatgatcctaaccgtgactctgtactatgcgcaacagcggcccttgccctcggcttctccgaaaccatgcaaagccaatcaagccacagtggaaatcacagcgcaggctcccgggctttgatcagagaatgtggctggaatgccaaaacccctgggctgggtggagcatgtttcaggatcagcgtcggcgcagaactcctgaactgtatgcgatataattggacattgtcttgggatccaaatacatggggaatcgatatggacatggatcatccacaagccgcaaatggaggcaatcaagatctatggcatcatcggatactttatattttcgcgagagtcatgaccttcaaagcatcttcgcgcccatctcacggtgtggcgcgggctatccagctcaacgatcatgaatggatcactcacaacaggtggtgtgaccaatgggcgaaatccattcctagatcccttgtacctcttggtcatttgcagccatggcaaacaagttccaaatcggtctttcctgaagtttggtatgtcctcaattctcgcattcaacctgttcatcaactaatattcgtaggcttgtcaaccgatctgccattgtttctcaattattctaccacgcgactcgtattatgctggccaaaacacacccttttcagtcagagttcgatgaggatatgcgaaagatgcaacgcagccatgcgcacgaaatttgtggcattattgcctacaccacagatcggttagtacaaatcatgaccaaaattttagaaatatctgtctaaccagttgagcagaagtgtggcggatatatccctgtactttcttgtactcgctgcagagtgcttagaaacacgagaagcccaagaggaggtactcggcatctttgataccatcacgaaagtgacttgcagcagtgctgaaccaatcaaaaacgatctcaaacaaatttggagctgggccgaagctcacccacacatggtgacgccagcccagatgcacaaccacttctatgaattagacccatccctatcagtctccaatcacccggactcatctccaagtctacacaatcccttgttgactaggggtgacttctcattggagagccacccgtatcaaggatactatgtgccaccacatcaccaccatgcactcaatcagtatcactatgggtcatttgatctgatttgatgcttcaaacactttgacgaatcatgaattttattgtccaacttcacattcatactgcttatacccctgtgaatacaataacgctaggtttcgctaaaaaaaaagctccatggcagggctgttcccagctactttgggacattcactgtctattccagtattgcatgactaatatgaagcgttgtagacgattaaattagcatgtatctcagttgttgaatttagaaatggccaggaaggtggggtttaagaactgttaccatgtatagatatatatctgagatgtgatttattaacacaacaacttagcgactagagagaacgatgttggagaattatgacaccagctagctttgactgtggtcttgctgttgagcgcaatacttgccacaacagtcgctacctcgtggcttatgacttcatatttcatcttgctcggttcttaaataaacacccgatcataacgacgtatggttgccacaaactttgaattacgtactatatacgttgaacaattgcgcaaaaagtagcatggccaagctctggtctaaacgacaggttcgggactcttccgacaactggtatatttgaaggacgcctcatcctccttttcgtgaatattgcgttgaaaagtttgaaaattgcacacacacaacttactcagattacaatatgtcgaaccctgccgaaagaattgcagaagataattatgaaagagacaatgacccttcgcccgtgaccggaaccttcgcagatgactcttatgtcgaagagaccgacccaagcttgagagcacaagtccccgtccagggagatgaacagccatttgatgacccaatacaacctccttattcaaattctgatcagcagcttggtaagtccatattgtatttcttggcaaatatccaagtatcagcgaactaatagcgtctatagagagagacgagaacgaagcaatcgataactctaatgtcctaaaaggagaccgtctccgtcatgcaaagcctagaacctcgaacaggtacaatgaggggccaggtgaacatgatctgccggctgagccttaagtgatttgcaattgttcttgatctatgaatttgtgcggatatcgaaacgcagtaatacaaaccagttgaatttcctcctgttaaagtatctaaaatctcgatgaaagtgtactctactatgctctgtaggtatgtagatatcaacaacattggaaatcgtccaagcgctaatcttcagggtgttggggttgataagacgtgctccagtcagaaagaagtggtgcgattgaagttatatggaggcttactacagcctggacctcgggagattgtgtatccctcaactatcgtataggaaccgagttaatctgatcggccccgggggaaagggcaaattaccgatgcgagggagtccgttcaagtttgccgaatcggtcgacgaaagttgcggtcataagtcgatatataactgcaattcacattattatcgagaaagaaaactggactaaaaacggaaaaaaaacaaagctccttggccagcctgttttctgcgtccctgtattctggaatataagaatataacccttttttctatcagtcatagccatccaacatagatatctaggtgttgtagcttatttgtaggtgaggctcaagtgtggcggtgtaggcaggcaattccacacacctctgccgaagatacaagagaatatatcaacaagcaacaaccacacggtatctgggatggacaccaaatcagttcaagctcaatctccagctaccccagtatacatacttcgtggacatgcttctccaattcatgccctgaacatctacagccagaatttacggcttgtatccggcgacgccaatggctggatcgtcgtttgggacctggtcaccaaacgccctgtgacggggtggaaggcccacgagggggctattttggaggcgagaggctttaatgttgacttaggtgcgactgagatttacacgtatgatgattcatccaccactacctagccctggaggtatcggctatcctactaacatctgcaatagacatggccgcgaccacaaactatgtgtgtggaagcttcgaccagaggatgaatctttccttgataaaacgcttccagtggatgtggctgagtccgcacagccagaaaataaaagccagccgtggttactccattccttgcccgtgaatgccctcaatttctgcgcattctcaatagcatttgtgaatgcggatggacttcctggagctccatccaaatctggaaaaccagagaatactctctttgcggtacccaatgccttagactcgggtggtgtcgatatttttcacctaccatctgaacgcaggatcagtactatcccatctgatcaatctatccaaactggaatgttgatggctgtaaatctcttcacgtcaccttctggggatctctacgtcgcctctgcatatgaagatggccatgtcatggtcttcgttcatcgtggagctctcaaatcggccagctttgagcgtgagtatattagcagcaaccctttgaaatgggacaagctttacgctggccaccctcattcccagccggttctttccatagatgtcgccccctcccatagatacttcatctcttcttctgcggattctctgatcgtcaagcatcccatccccagcatagggcctgcgggttatatccctactcctggctacaaagaagaatccccattgaagattgtcaacacaaagcattcgggtcagcagggtctgcagatcagatcggatggaaaggtatttgctactgctggctgggacggcaggatccgggtatactcggctaaaaccatgaaggagctggctgtgctgaagtggcacaaggatggttgttattctgtagcgtttggggacactgaaagcacgtcttcgttgatgtcttcatcgcctgagtctgcaagacaagaacctcgagatacagaccagggcgcagcaggacagacagtcatcgacgtacgcgactactctctcgcaacagtgcagcaacaacggaatcaaaaagtacaagaaactcattggctagcggctgggtccaaggacgggaagatttcattatgggatatctactgagataaatgctaatgctacaaaacaaccatgcgcccatgcttttttgagggagtccactgagcgaaaatcaagccaagttgaactcgttagctccagacatatgctccctcatcttggctctcatcttgcgagcagcctcgtccgtaacatttgttgaagatggatcgtcatcggcctttctcttattgcctgaaacaccgtttcgggctgccttgaagtcctttttggtgtcttcttgtccaggtcgcagaccggggacgttaattttacccggtcgatcgcgcagggcgaagctctttgcaagatgacctaagtgaagttccttaatgtcgaacatgcttcgctcagctgaggtgtgagtcgcgtaagctcgaacatgagattggaatgcccgtcgagccatttccagatattcagggttatcgagtgcccaacgctccacgtccatctgccaatcggtcgtcttctcctcccagttcttctttttgttgtcgttgccgccaaagccacgcttgagaatctcgtttgcatcagtgcgggtgagcgccttgcctccatcgcggtagccacgttttagtacttcaacatagttctcttcacagccaggctgaaggaagacgagggcacggccatctcgtccaacacgagcagtacgaccaatacgatgagtgtggtcatcagagctgaaggcagggtcgtattcgacaaccaagtccacgttgggcaaatccaaaccacgcgaagccacatcagtacagatcatgacacaagcctcagtactgcgagagaaagagccaagggtggcggttcgaacgttctggggaagtgagccgtgtagtcgatgcaagaggaccggattcgctggggtcgagaatgctctaccgagagcaatggtgccatggggtgacagtttttctttttcttcatctttttcatccttttcgtctttttcttctccgtcgctcttcctttgttgctcgcggtcttgattccttgagaatagctcaaaatggaaatcgactacgtcggcgcaagacatgaaaacaatcgccttcatcactgatccctttcgcatgaacgtcctcttcaagtaggctgttaatgaaaccagacgtagcttagctggaacaatcgcgtacgactgcttaagctgggcggggacacggaatgactcttcctcgtcctcatttggcttctcgtcgtcctcctcggacgggtcggctttgatgtgtaccgcatcctttaaactgatttctcctagtttttggacattcatctttagcgtagcagagcaaagaattgtcgtccggcgcgtgggcacaccgggaacgcggctcgggcgttgcctagcgtcaagtttcttgacaattccttgcagttcctcctcaaatcccatgtccatcaaacgatcaccctcgtcaagcacgagccaccgcacgttgctgacatccagcgcttccgtattgtcgagatgatctaccaatcgaccaggtgttgcgacaagaatgttcaatccttttctcagccgtgccttctctgatttttttttctctccaccaattaccgttccacaaacaagccagttcgcacaatgcaggatgttctccaacacgacggagatttgcttgcacagttcacgggtgggtgccaagataatagcgaataatccactgtctcggtggacttgggtatcgttatgttcgttcttcgcttttgagagatccataattcgctgcactagcggcagaagataagccagcgtctttccggaaccagtttcggcctggatgaaagcatcgctttcctccttcagcaattgtgtaattgagcttgtctggatagctgtcggcgccttaagttccagctttgtgagcagatgtgctgcgagattgggagacaggcccagattcgtgaaagtatccagtccgtcgatcagcggcgcattagtcggtttcgcgtcttctgcgtctctctcctccttgggtccttcgggattgcgcgcttcaggattgctactgaagagcgaggaaacaaaatggcggggatctcgtgggtgttgctgttgtcgtcgatcaccgccagagcgcggggcgctaggacgattgaacgagtctgagtcttccgtcctttgtcttttcacgggccgtgcaccgagttggatctggttcggattcttagatgctgcatttcgcgcagctgcatctccatctccgggttctttctcagatactcggtgggctgagcgcttctttgcggtgagtcggtctcgccatgttcctcccttgaacttagcctcaggcttgatgacactgtcgccaatgctaaagttcataagcattccatcgtccgccattttgaaatatggtgatcccctatgaaaatggggaggagttgtgaagatttttgttgaaccggcgatccaaaagctttcgagactttttttcggtgccaagacttccaggctctcaggcaaattttctccgccctaaggatttgccctactttgtttacgttgaactgcaaaaggtaaatggagatatatttgaatattttgatgtctatcttgcttttaagtaatgtatgtgagcggcttgcttccaaaccatgttatgctaaagtgttagatgttcattactgagtggtcgatatagtatcaagcacgaggatccaagatgatgttgtcgatcagtcgcacagggacctttccatcacccaatccacaagcttcgcctggcttagactcttccagcggtgccatcttgaatgcggtactcaaaaccgcacccttagccgggtcaacgacttccagctcgtcaagggtatcaggatcggcaagagaaatgtagtcgacctcgtaaagtgctctctcggatggcgaaagggacttttgtccggaaaagacggaatctgtcacattacgagcagctccaaggatatctgcccggctgttcttgccgcccagatatacttcttctgcggctttcagtgccttgtagatagtgagcccaacggttcgtctccggtcgcccaggtagacgtttcgtgagctcagcgccaggccatcaggttcacgcgtagttttaatgattcgcacttcggtaccaacatggaaatcctctaccatgcgcttgatgaccacagtctgctgcacatccttctggccaaagtagacacggtcgggggttgtgatgttgaaaagcttcatgcaaactgtcgccacacctcggaagaataccggacgagaagcgccctccagtttggtagccaacggagtaattgtgacaaacgaaccgtttccatcaacctccgacgacgggggaagaccagggtacataaccttcgaagtcggtgcgaaaatggcggtgatacgcccggcacttgcactgttttcgcccaaccgctcgagctcctcattcagcctttccaacttctcaacgtcagtatcccaggtgcggggatagctggacaaatcttccgtgactccgaattgtgtgggattgacgaagatgctgacgaaaatgtctgtgttctcgcgagcagcttgtcgaattaaggaaagatgaccctcatgaagtgcgcccatggtaggaacgaagcctacactccggttcttttgcaacaattggcgccggagtccccggatcgagggaacatcacgaaagacttgaaagctggatggtcggcgaacagattgcgaagccgcggtcgcgtcggcaaagagcgataaagccgtcactaggataaattgagcttatctggcgctagaatttccatgaaagagacatactcgaaaacgacctcgctccattgaccaagcgagacatcttgtgtgaggttaatgaacagaaaacgagcctgggatgagagctacgggcacatctcagtcaagcccacgtgacctgcctcggctgatctctggggaatccgagaaaacatccgggggcgatccgcgggctgattgccgcttgagagcttgggggttcaagctatgatttggtcccgcacttctcctctaagcttctcatttgactcctcctcttcttttctcccatggacctaactgctttctcgtgagctgacttgaagtataaccattctcgccctgcccccttctacaatgccgtctcctaagtcggctattgccgatgacaactcggcacccgatctagaaatcgtcaactcacagttgacaatacatccatccggcttcactggaggtccggaaacccaacatgaacaaatctccgaacgcaaccttgtcagcaacatggcgcgatttcgcgagaaccccttccactttctccgggaagtgagcctatacatgtccggcacgggatggcgtgcatatgacaaccctatcggtcaaccgatttactattctggcttttccgaaaagatgaagacctccatattgagcagcctactgctgcaaaacaagattactgaattggccaatcgtcgactcatggtcgaagagaaggaaggactgctagcaatcaatgaaggtgcaacgctggacgacaaacgggcccgtcgccggactgagattgaagataatcttcgagaagtcgtggacacaatgatggaaaacatgatttgcaagatggaaagcaaaagatttattcggggcgcttattatatgtgcacgcaacttttgactcgtgcttaccatcaaggtaaatattccctgctatactcattctatcgcaagtcaatgctaaacgatattcaccttaggcatccatgtatccagcgaagaagtcctacgtctaagatctgtagccgagactgctaccaagaagaagcagtccattgttttcctgccttgtcacaagtcccatgtggattacgtctcgctgcaactcatatgttaccgtctcggcatttctcttcctgtcatcgtcgcaggcgacaatctgaatatcccattgctgggccctttcttacaacacgcaggtccgttgcaagacaatttcctattagcttttagctagcactaacctgttttaggtgccatgtggattaggcgcagctttggaaatgatcccttgtataatactgtcgtacaagcttatattgataccctccttcaacaaggcttcaacttccaatgcttcattgaaggtggtcgctctagaactgggaaactgctttcgcctaagttcggaatcttgaatttcatcatggacagtatactatcaggtcgggttgaagatctcatcatctgtcccgtcagcactcaatacgacaaggtcattgagactgagtatgacaccccgctggtaccctaaacttttgatgagcattggcattaacccattctctaggtcatacattagcgagcttcttggtcaaccgaagccaaaggagaacttggctgatttcatttcttcgtcctcggttttgaccttgaagctaggccgagttgatgttcgtttccacgagccatggagtctccgagactttattggccagcaacttacgcgactagatcgccccagcaccgacatcaacaacaaacttagctatgctgatcgaggccgcattctaagaacattcggttatcgggttttgtccgatatcaacgacgtgtctgtgatgatgccaaccgcccttgtgggaactgtgctcttgaccttacgcggccgcggagtcggaaagggcgaattggtgcgccgactggactggctttgcgatcgggtgcgagctaaaggtggaagggtcgcacacttctatcgctcgccaacggagacggtagttgatcgtgcgctagaagtcctgggacccaaactcgttggtgtgatctcaggtttagtcgagccaacttactatgcggtagatcgtttccacctatccttttaccgaaacatgctcatccacctcttcatcactgaagcgctggtttctgtcgctatgtacacaaagatcaagcaagggggtgggcctgccaatcaaataatcacctacgaggatttgaagaaacaggtgttattcctgtcgcaggttttccgcggtgaattcatttttccacctgagggcttgactcacaacctcgataaaacgttgcgtgggctagagaaggatgatgtgatcaagatcactcgtaatgaatccagcacaccactttatgttgaattgagcgagtctgagcgactatgcggtcgcgagaactatgacttctactgcttcttgatctggcctttcatcgaggcctcttggcttggctcggtgtctcttcttggattgacgccgcctctcgatagtccgaaggaagtttggatcgattcgaagaaagcacaagatagtgctcaagtcgtgagttatatttcccatgctacaccgactattgtattaatattcacattcacagcttggtaaaacgttataccaccaaggtgatctctcctacttcgaggcagtcaacaaggagaccctcaagaattcttatcaacgatttgaagaagagggtattatcttagttgcgaagaacagaggatcgcgtgtcggtccgtctcttaggctggctcctgaatgggcaccccagcgcgacgaagctactggaaaagttctagctggcggtcgactgtgggactttgttgaattgattgcacattcccgtcgcgaggggtgagttcattttattcagactatctctgccaatatacgactaacatttcacagcaaaaaccgtcgtgacggtgcaactgtttcttcccgcgttcttatcatgtctgatctcgttggacggaagctgttccaaaacgccgcggcatcggtgcctgccgatgtgtcgtcgcggcaaatgcgccggaatgcaattggagctgaggcaaagctctagtcattcccttttgatacccatgtacacacattgtacaggctgcttctacatctagctcttcctgcgtgtcataatctcaatgcacatattttagtaaaacatctccctgtctataactaagcattaattatcagctaatggatgccacctatagaatcaaataggtcatacatcgcttcaaaaaagaggagtaggcttgattcacctgtcagatttaagagtggggatatttggctacgaaggtcttcaatctctttttatagtggtccatataaaagtccagaatttagaggcataagtcgaagtgatagatcaacgattccaatatgacatacaatgtacaatatatatggagtgatgtaggtatgaagtcgtatctctaactcgctaacattgttgctgttcacatacaatcttcaataaataatcaaatataaaaacaacataagacgaatcaaatccaaatccgctgaactgttccccgtaagatcccaaaacagaaaagatgaaaacagaagaaaaaacaaaagaaaaaacaaaagaaaaaaaggctcgaccgctatagaaacaatatattgaagtcaccgaccaaatcaaaccgtcacaaactgacccttcacacccggactcgtgggagccgatcgaacagtcataaccttcggagaggaaacatcgattgacaacttctcaatagccttggtggccaggggcgacctaggaggtgtcgtgaccagagaatcggtagaccttttcgcaaactcctgaagccgacccataatgaccggggaatcagagtacagtacaataccctgcgagtaagtacatgcggtagctttctcttcatcgctagcgaagtcctcgtgagcagcctcgcgcgtaatacgcgggaaggtgcgcagtacgacatggcgagtgggctcgctcgacggggtgtgtttctgatctttgctggtagcgtactccagccagccctcgttcgagacactttctgcgtccggggcggggaaattggcaacgacgagctcgcgctcgacccgtgcgtgtctccatgtctcggcggcgagtttgacgatctttcggacgcccattaggagggagtcgaggtgcttgggatcggcaaagtgcttgatgtggtcgatgatttcgtcgacgatgactgctgctgctacgttgattgattgtttggcgtctgaggtggtgtaggctgctttcagggtctgctggcgccagaatgcctcacggcggacggacttgcgccggatgtccatagatagcatctggaagaaggtgtcggccttgtcatatcgccggcctaaggtgaagaggaagggttggaagactcggaaggttagggtttttgagatgatatgctggatgtaagcacatcgtagttcgcgggaggctggagtattgtcgaggaaaggtggaagttcggatggaattttggaaaggatgtccttggggggatcaatggggagatatccgaaatgctccttggatagattgtggatgagctgcgagagctctgtgaagcagtcaagactagaaagagagagtttattagatcatgtccatttatcgtaatcgttatcgtaatcgttatcgttatcaacatgaatcttttaagataatatatgcccgccgtgcgccgatgccaaacaaaggaaaggtagagaatgaatgacttgtctttgaagacaaagacgaaaaccgaaaacaaaagaagaacaaaaaaaaggacccgaaaaattaaaatccacagggcttcaaagactgacttacaagaattgatcgcccttcgtattcttgaggtcagtggcctctcccaggctggacagtgtctttctcagcctttcgcaatccgcgcccaagttatcgatggtcgttcgcatcccatccactgcacgctggaggtgctgctccttgacaataccgtctccttccaatttttctttctctcgctcggcactggaaagctcgctatctctctcagatatttgctgctccaaggcagcgcgctctgtggtccagagctgctctttctcattgaagtgagcttccaggtctgcgatcttatcatccaattctttggcagcagcagcgagttgttcgtcgtgggattgtcgcagggagtccaattcaccagcatggctttgtcgcagggagtctaattcatcagcatgggattttcgaagttcttccgattcttgtgcgttcttctggtgggtttcctccagctctgcgagcttggctgccagttcctcacgtgtcgatgagagttcggtaagtcgggcttgcagctcggtctccttggattccaaagcagcgatctgcgacgccacttctgtcttagtagcctccagctcggtgcgctgggtttcgaaggattcctgcaattgggctttttctttctcccattcggcttgactagcttcgtgttcactgcgaagctcgcactcacgactctctagagcctcagctgccgttttctcatcctccgccttgatctcctcaaacaattcagtgagctcctccttctgtgccacaagagctttctcctgttcctccttctgagtctccaacgctttttcgtgggcttcggttaactcctggatgctttcatttagctggttgatttgtccctcgagttcgaccctagtttcagaaagctcctcgttggacttctgctggacagctatgccatcttcaaggtccttctgcttctcctgcagatctcccagttggagacgcaactcactgatggtgtgcctcaacttggtatcttcttcagcactttcattggctgtcttcatcatttgagcttgcagagcttcgatatagtagtctttgtgcattagagcttgctcgtgcaggttttcaatatgcttcatctcagcctctcggctcgagagcttgctgtgggtgttacgatacccattaaggaggctgttgatatctggaagcgccgactggatgcgttgaagaagctcaatgtgatcaccgtcgttgtctgggggagatccattctcatggggttggccattgcccatggacaggttttgaagggcctgatatgatgctgcatatgatggatctgggatgctgtagctcctataatggccttccgattggtgctgaggagaataatgcccataaggaggcatcgttccggcagggctcatgacaggagattgaagagcatacgttccattccgggtggaaggcggttcatggggaggcattggcgcggctggtggattatgaggtggaggagttgcagttggtgatatagttggggacatttgagggtagtgggatcgtgcaagcgggctactgactttgggcaccggtgaggcaatgtgagctactgatgaggcgtaaggtgccggggaacctgcgtagggtccgggtaagctgtaaggtactggagagccagcgtaaggtgtggatgaggtgtaaggcacttgggaaccagcgtacggcactggagcgtaaagcgccggtgaggcgtagggtaccggagaagtataggcgtttggcgagacgtacggcaccggggaggctgcgtacggcactggcgaagcgtaggggtttggtgaggcgtatgggtttggcgacgcgtaggggtttggcgacacgtaaggtggtggcgcagagtaggggacaggtgaagcgtaaggggaatacgccgatggtccgggataataatgttggttatcctgggaaggacttgacatataccgtgcttcagtcaaggatggggaaggcaaaggcacacaggcggccacaggggagaatgggtccgccggtagtgatgagactacagtcgtctcttcagggcgctcagcttgattgggctcgtcttgcttgttatggtcgttcaagggctcctttgcttcaagatccgggataggctgaaccacacttgcttcttccacaggcggctcctcggattcagtgccctcgatgggaggctggaccgagcttgcttccacggccggctctttggtttcagtttcttcgatggggggctgagttgagcttggctcgtccaagggtggtacttcgttgacaggctcgtcgactacaggtgatgattgatccacgacagggtcagggatgtcttggggtgaagccttgtcgtctaacgcctcggatgccgatacgggggtttcgtgtacaggtgatactgaatccacgacagggtcggagacgacttggggtggagtgccgtcgtcaagtacctcgtatgctaatacggggttgtcgagtacaggtgattcttgatctgcgacagggttggagctgttttgaggtggattgtcgtcgtcgagcacttcgtatgctaatacggggttgtcgagtacagatgggacagggttggaactgtcttggggtgtactctcgtcgtcgagtacctcgtacgctgatacaggaagtggcgtcgttacttcaacgtctgtattgccagcagtagactcttctgttacttgctctggttcctgcgccttgagttcagggctgccaggagcaggagtagtggtagttgtctgagtctctgtgacctctgggctcttccccttcttaaccttcttgggggctgccttgccatttttgtctttggccttgttcttcttgcccgcggccattgcggtagagtgatgcgtgcccaagacttcttgcttctgacagacgtgttaccaataggatcaatgtgctaaatggagcatgagtgatagttccgatcatatgggatgaatgcactgtacatttgcaacaagccctgtggcgatagctcaagatatagcccaaaaatcgactatagttaagaggtattagaactttgggatacctaaaagcgtaagccaagtgacttcggtggatcgggcagagacctaaactctttggctatgaccgcgaatgaagacccacgaaagcgtagatattctcggggtgtaagaccaaaagaccgtagggaaggaaaaaaaggaaagaaaaagaccaacccgatcgaattttgcaaaaatctctcgaaatttgcatcccaacgttgtctgagcacaacagcggaccgacccttagcgtattgatacccatccaacctcccaatgtgcgagagggccatcaattagacgccagtgccgggaattattgggggcaaaaacaagatccgaatccactcgtattccattctgaactcaagcgagaccagttgggagatgccatggcattgggcatcaaactgtggatttgggcgatcgagataggtggggaattcgacaccgacaggctgacatgtccgatcgagacccgaagacatgggaattgaaatgaggcgatatagcaaaaggacgcgtctcgcccaagtgtggtcaactggcaatagtgaggctgccatcggacaacacatattactagatgaggcttcgaacatacggccatattggacatgcagattgtctactccgtactttgtatgccaagtagatcgggcttcagttttattttggtgttttgtatctgtacatagtactacacagagtgcattgcattgcatatagtactgatgtatctattgatcatgggagtcttgcaatgcgatactgaatgcatacgacgtatacggagtacactgagttggttcaccttccactcaacacctggacatgagagaatgaaaatatcagatcgattccagttgaaacatgagtccatataacaatttaatagccagcctaaatacacctaactataactaataagctaactaataaacgaagatcttagaccacatacatagttagggagcgaccctaaacccaatacggacatcacgtgtcatcgactttcactttccgcctcgccctatcatcactccccaaagggtcatcgattcataatcaattgcttccctccacacaatgttcgctgccagacgatctgctccttcgacgcggcagctgctgcgcactcagcgccgctggggctctcacgccgcccatgagcccgtgaacgaaggtctcggcgtaagctcttctcccccgcccaccgcgaccagacccgagtttggaagcagagcaagatatgcctcgatcgcccacgagtaattggctaacccttacgtgtacacctaacagcgcagcttctacgtcacatctggcaccatcgcttccgccttcgtcctctaccacatttccaagtccatcaaggaatccggcgaggcatcttggatgaccggcctcattaacaagtggacgccttcccaggaggtcttcgagcagcgcaatgctattcacaccgctatcatggataaggctgcttttgatcgccacttgcttggcagtcaaggcccagccgaggcttttgcccacagacagcccgagtatgtcatcgtgttgctccggaaatgcttttcattgttgtcttgctgactgttttttctttttccccaggatgttgaacgctggctctccgttcaacgtttcgcccggttcgcaggccgacctgagccatgtcgtggctcactaccagcgcaagaaccaggagatcgaggagtctcgggtcgcgcggacgaaggacggcaaggtcgtgtcgctctacgattaaatgggggtatcttttctctttagtcgactgtctaagtagacatgtgtggaggaaaaatcatgtacatatacgttgggacttgacgttcaatccagcacctgataattggattttcttttgtttttgacctaacgcccagatccttgctgaatattggttgaatgctggttttggatattcattttattaccgaattcgctaaggcccgcttgacggtacaacctccaaaactactctgcccacaccctcagattggacgtccaatttatgctgcacatccagctcattagcagagacagtacccagcacggcaaggaactcatcaacgccaccaccaactccgaaataaaccttcttcgccgcgacgagagcccgacttttcaccgatgcagtgttcgagcggcgcagcagcgccaaaagcgtctcggaaaacgcagccagcgatgcgggtgagtaaatggtctcactagcaagaactagagtcttgcgagcaccatcaccggacgagaagaccaaatccacaaacccgggcgaccaagcgcctgaaatgaaatcaaccgagatcccacgctgagtaagatcatctttgaattcttgaaccagctcaggcgtgatatccagctcctcgtcttgccctcgtgcagttaacacggctgagacagcggtttgagggcggctattgtgccacgtcaaaaggagattcgggagcgtgacaagacggagcacgtcagagttgtagtctgcaaaagtaaagagtgtctttatttgactctggccgggctgggcttggctgagaagacgggcgaacagtgtcaatgatggaactgctgtgcctgcgccgagctgttcattcatgttagctttcttctgccaggtggaatttgggagaaagcttccaaatggcggatgatttacgcacctcaataatatggatgtccgccgagctatcggaggattcgttaagaatgtcctcattgagggagagcttggctagatccaaggcacattcccaggttttgaagccgccttcatagaaattgggcgtgatatcgcctttttcaataccggcaataagctcttcattatcgtggcctgcgctgtcttcggccatgagctgggtgcgaatgtcaaagatctctcgacgagcgacgaccagaggcgtatcgctaattgagagcttattgtagaagatttgagaggggagaattgaaagctgccatcttgattagattttgactctggtggaaaggtatgatgcatttcaaagtaatgaattcatgctttcatgctctcgtcgatgatactcttcggcccgaattgggatttagaatgtactcgccaactcaaacaatataatacgcataattgagaatgaaatatcttgcttgatcacttacccattcattcatatcatgcctactcgctttcacgagctcaggaagagaattgcccacggcttgctgggaaggcatatccgagaaatcttgattgatctctgaatcgtcaatgtcgatatcatcccccgagaatccgaaactgaaggccatcttcacgtgaataagacggctgtctctccttccaagacacctagtattgtgtaggtgggttgtctgaagtggcccagatgttgaattcgtcgaaattgtaggttgtggacaaacttgcaccagttttggcaagaactgtatattcaaaggtaaggacgaaccgattaaatagtagtttagttccgaggctttcttttcacagatgctgtgatctgatttcaatactccgtacaaaaaattgcatggtggaatgatgactaagcggatatctggcacggggccttacctaggcaaagaattattatttatacaaaccttggagacaacggattcgaatgctattttgaaactgttagagtcgggctgtaataactataatatgattttgtaatgatctaactcataatgccatatccaagtgattagaaactgatgctgtctattccaatattaaatgcaagccgaagacgtgaactttaaattataggctgcgtttaagccttctgagccactgcagccaagctgagagcctgcaacacatcagcgtgcagatccactgcatcctcaataccacagctcatacgcacaaggtcatcgaagacaccggccgcctcgcgctgttccttgggaatgcctgcatgggtcatgctggaaggcacctcgcacagactctcaacaccacccagactctccgcaagggtgaagatcttagtgaacttgcagaaatcgtgtgcagcctgctggcctcccttgatacggaagctgagcataccaccgcccataccgtcacggtgctgcttgagggcaatagcgcggtgggggtgggagtcaatacccgggtagttgacggagatgacgtggggagaggattcaagggccttggcgatgacagtggcattctttgacgcctcgcgggcgcgcagatgcagggtctttagaccgcggtgagcgagccagcagtcgaatgcggacgggacggcgccaatcgcattctgcaggaagccgaggcgctctttaagggtctcggaattaaaagcagccacgcccataaggacatcctaggttcaagttagctgaattgatactggcaatgcgtaaattggaagtaagaactcacggagtggccattaatgtacttagttacggagtgaacaacaatatcggcaccgtggtccaatggattctggacgtaggggctcatgaaagtgttatcgacaacaacctgaatgccatgctggtgggcgatgttggcaacagcccggatatccaccaagccaagggtcgggttggagggggtctcgatccaaacgagcttggtctcggggcggatcaacttctccacatccgactcaatggagggggtgaaggtgacctggacaccgtgcgccgaagcaaccttggtgaagtatcggtgggtaccgccgtaaacatcagagaccgaaatgacatgcgagccagcagcaagagattggaggatattggccgtagcagcagagccggaggagaatgccagagcatacttagcatgctcaagagccgcgatggcttgctcgaaattatcactgtggggggtattagtccgcctgatcgatgtgtcaaaccgttggactaatagactgaccggttggggttggagctccgcgtgtactcgtacagaccaacggggtttccgacactggtctgagcatatgtggtcgacagagagatctagtcaaggtatcgttaatgccgtctttctttctcttctccctagattgatgagcttaccggagcaatgacagcgccggtcactgggtcatgaggcgagccggcgtggacagccagtgtcccaaagccacgctcagaagtgtgtccgttttcaatggagcccattgtgtatagagaagatgatttcaaggcaattgaaagaggcgaggggtaggttatatgtttatcgataagatgagatcacccgctttctttgtatgacttgtctgaaaccggaatgagacacggattgcgaatctgattgataatcaggagcgatggcgaataacagattcaatgactgcttttggatgttttcgtgctgaaaaattcaaccgagggagaaaaaaattcatcagaatccttttacatactaccaaccttggggggcagatgacgatggatcgcgcgatttcgactggacgagacaccgacggagctccaccggctgccggcaattctgctcggagaaccgtttggatacgccgatgagtcggacagtcggagagttcggcacttgccgcattgatctcctaattggtgtgtacgatactatagttatgcagtatattttatatgcatgtccgttattttcggaggtatatagttacacttgcccaggtgtattccatgtcaaatagctttacactgtcatctcggctcattacacatggtctatcaggtatctttatattcattggcattgattcgtatgggtatctatctgatctgactctaaaacaaattttatgggcgctgagaacgggtcgcgataggcgaacaataagacaatctaatgagacatcaaatagtggtttgctggcagcagcagcctaccaccaagtgatgggtcccgttccacccatttgcatcgagccctagaagatgattagtgagagctagaaaatcaacatggagagaccaacaagaatggagtacggagggcgcctctcctgtggggtttcatctgcaacatctggggcattggggatttggtcgtgccactcttctgattcgactcggaatcgtacaacttctcctacatcgaagaagaattccgttccaccttcactctcccagatccatacctgctcggcatagtcgctgcaagacacattagcatttgagatttgacatgaggtgagaaacagctcacaatcgggacttctccataagcatttgtggcgggatcagaatatcattgaagaattcgatgccaactggacttcgttagtttcgacgagcattgagtttttatactggaaacacactcttgattccatgttctgtgccgctagcgatctttccaagcatgatctcccctttgaagggtcggaaaacaatcatgcggaatttaactatgatagtcagtaaagagctcatacttgagaaaggggtgacatctaccgttgacattaaccaaccccgttccgtggccaatcaggccatcggaagactcaagtaggtcatagaagctgatgcagaggccaattttttgaatgacctagagcgcgggataaggttcgagaaactgaaaggaagaagcttgaattgcgtactttattggcatattttgcattgatgttgtcttcaagtgcaactgcactgaacttggagaaatcctcaggtgaaatctgaatcaagtccgatatggtggtctgccggcgttagaaaaaagtcttatatatgggcgtcaaacttactaggataaacatggtggcggcgaggaaggtgtagccagaagatcggtctgactaggcgaggacgaagtgaaaaggcttaaatatcttttcccgttttaccattgtcacgaagcaatcaacgatcaaaaacccttctgagattattgctccgcctataatcccgcccacacgtgaccccgggacggaagctttcaatttcaacctcgactccgctaataaactaaacttaagagattattcttgtgttggtgctggagtctccagcaaaccaaggctctcgtcatgagctcgcagggattctctttccctcccccgccgcctccgccgccagcgaccaaccaactgccggctcaccacccgacccaacatggacagagttggggtggacgcggtggacatggcggaggtcagaggggacgtggcagaggacagggaaaccgaggtcgaggaggaaatcatgcagaaagtggacgagcgccgtcatatcctcccccgacaggtttcaactacgcgcaaccaatgtacggcggatatccccaacctcttcctacagcaccttatatgcctccccaaccctaccatcatggacaaacgccggcctttcaacatcctcaaaatccacctccatttccatctcaacaatatccccagtcggtagctccggggaattatcaacactacaacacgcccaaccttcctacaccttaccctcccacaactccgacatacatgcaaggtttacaacctccgcatggccatcaaccaaacaaccaagcaatgatgcctcccatatcatggcgcaatgagatgcaaggtgcggtgccatacatgggggctcaaccggggcaagcacgagggccacgacctccccatgcgtatggcaatcagggtccgaaacccaagaataccccaaagcgggatcactcatctgcattcaacaaacctcaatcaactgcgcctcgaacccccgcagcgcctgccgtcccaagcttcggcaaccctctaccctcgaagccaccacccgctgcagactcgaccgccaacagaaaggcgaagaagagaaaaaggaagcacaatcaacttggactgacccctaataccgaggaccacgagtcaagcgaagaagaggttgacgaagacgaagaatcgaagctggcgcaaagtggatctggcgcagcaccacttcaggtctcatacaaagggaaaacggcaacattacaaacaccgtccgatattgccgcttggattgcagaacggaagaagaagttccccacgcaagctcgggtggaagaaaagaaaaagtcaatggaggaggcaaaggcagcccgcgagttgactcgccaacaaaagcaaaaggagcaacaggacaagcgaaaagagcatacacaaaaacaaaatgaacacaagacagatcccgctgcagatgcaacgacaaacgcccagcgcagagagaagattcggcgcaaccttgaacgagaggagaaacgaatccaaaaggccatggccgagaccgaagctgctcgcctccgaatggaagctttacagaaggaggcattgagcctaaatgaagactttaaccaagacgaagatacgggtagcacgatcgagcaaccggccctggttatcaaagctaaacccgcaaccgcggtgccagcgccagctatgaaaaccgaatccgaaaacgcggtaacggagccagccactaagactgaactagagaccgcggttccggaggcgaccatgaaaatcgagccccatcgcccaattccagagcccgcgcaatcaaccgtggaaagcggggatgcgacagatgcgcaaggcgttcctgggcttttgttcgagtcccatcatctcgagcacacaatcaagaccgagcaccccactgaccatgacttggatgccatggagctcgcatccgatcacggggccagtgattggacctcctcgggtgcttctggctcagatacagactctgaccctgacagcgatgactctgcgccagagcaagtaacttcacgtcgcacgggaccagagcgagtgccaccgccaccccgccaaggcaaaaagaccgtctgccgctattttgcacgtaatggccactgtaaccgtggcgaccagtgtaaattcctccatgagaatgactctgaacgaccctccaaggccagggcaaagcctacggagaagaaggagaaagagacgaaacgcaagggactttatcaagctgtgagagccttatttattgattttgctcgtattgaagctgtactgactgggattagttgctggaccgacagcagcaagacgatgaccgccgggcaatggaagtgatattctggctcggtcagaacaatatgctggatgccccacacgataccccaatgaattagcgttagaactggaactacgaaacattgaagcgcaaggatgaagtgaaaaaggtcatagctcggaggcgtagggggctttggtcggatttctaacttggatgaatacccgaaccctcagtcgcgtggctccgatagtacagagtcagcgacagggaattgaaagcgaaaaaacatgccaaaaacataccaaaaattacgttgaatcacatctgatccccattattctgcctagccaattatcgacgtatccaatgatgtgatctaaatttatccccccaagagagggttgtctcgtcgaagtgactgtagccgaccaaagtggatatcgtcatttaaggtcacgtcgagttcagaccagtcaacgccggagatgccctgccaagcgaggaaagatggccgtcagtggtccgaaaactcgtggatcaccgccacgctctcttttttatcggttttccctcttttgccctggatttgtctcctattagggcctcgcgggccctctttgggatggacggcggccaatcactcgccttgcttcctttgtatttgtttttcctcgtccctttgactctgccggctgtgcctagctccttatccatggggcacatgccctcttagttataaagctaagaccaaatatccccgacggtcttttcttctatatttgcctcttcacacgccttccactcctttgaggctcttgtgatttcactcgtttatccgcatctcccacttgaacattcgtttttcccaacctatatacatataccagtcataatgcgcttcttcatctctctcgctgtcgccgccatggccgccgtcgccgcggcgaacagcaaggctaaccccttcagcattcccgtcgagggttacaccttcaaggtcggcgagcctaccgctctgaagtgggagcctaccaccgacggcactgtcagtttgatcttgcagtggggagccgtgatcagcggtaactccggcactgtcattgcctgtaagcaacctggggatccatccgaatgactaatattccccgataaggcaccgagtctgactatcaccagcgaatatcgataacgacggcagctacacatgggatgtgccctccaagctggccgcccagccagactacaccattaagatcgtctcggacgatgatagcgacgactacaactacatcggccgtttcaccgtcgagggctccaccgtcgaggtcacctctacctcttccactgccagctcgaccaccgcgtccacttccactcagtcatccaccgagtcatctacctcgaccacccacaccactacctcggagaagtcgacctcgacttcttcggccaccaccagctcccccactactttgaccaccgcttccagcactgccaccagcactgctaccagcacctctgcctcctccaccgagtcctcggcgaagtccacctcggccagcgccagctccagcgccagcgccagcggtagcgccagctcctcgggcgctgctagctccacgcccgcatcccagagcgccgtgcccaccaccaacgccggcatcgccaaccgtgtctccggtggcatgcttgccctcgttgccgctgctctgatgctgtagattgccatgcatgcagatattgtcaggaagaccttgttgcaaagtcacgttgacatgctttattgatgtatatttttttttttttttcttcacttctccgattggctgtttcctaaaacagccaatcaatttgtgttattgcctgtcccttttctgaggtgcagctgtacaaaacatcctcttctctgactacggtcgggattgtggctttgttattatttggtatactatttgtgtctccgtcagcggtaatgactgtatactccctacaatctactttataattgtgtattccctttatctgaatgatatattcgagtcatccgagtcatccgaatgaatctgtcagaaagacagtgggggaagtaattaatttggatagtcccgcgtccacttttttaattgtagtctaatctcgctggtagaaggaccttggatacagttgaatcacatataatagatctctagctgtggggagtatatatgtactccgcgaacattacctattcagattcaaacaggctatcctcccagtaaggggcctctctcaccgaagtacagagtagtactcctcacgaaggacataaataatgatcgtccatcggtggagacggtggccttgaaaaaaccaagcaaatttccctactaagtagggattttctcgtctccacagggttggagttgcggttctacatcattgttgtaccttgcaaagtctgataagcactttgggttattctccttctggtttttgactagctccgactagcaacaactcttctattttcctgtggcgatttgaaccttgttgtatcatcaagcctcgagtcgatctccgcggattgtgggcgagtgtatcgcaatacttgcaaggttcacgaagtacatgacatggacaccctatgtaccttcataggcacataaaactatatagtactcagaaatactcatcgcttacgacattgtcttgaccaagtccttggcttgtcccacttgaccatgtgcctgactcgtgaccacacaggcaccagcctccaggtaccaggctctctgcgatgaaatgtcaatctgctgagcgactcgacgtttcagttctccgtgaacgatgtcattgccagatggactaccacaccatgtgtttccaatatttccagggtctacttactccctaacagttcttgctatgctaggcaccagcgctatggaaaaagcaaccctggcataaaaaaccccattcaatgcatggctcttgacacaccgcataagcaatatgggagccccaagcaaatgaaccacgtcgctcattcttataatagcaccctggcatcgtcatcaaaagctcggctccaagcaagggtcttcacaaatctatcgcaggaacagtccactccacctcgtgtctgcagaggaagcaaggctcctaacactatgaagggcttttgctggaaatcttgaaacatccagtccatccggtcaatcaatagggcggattatggatctgggctctgatctatcaattgatccatgcccttcgccaaagaaaaatgtgattgcctatatgcaatggatgcagaagacatgcagaaaccggggtcctcgctatccaccttcttttgaaacatgaatggcccagcttgttcttttgtgtcacgttgctacaagatgacatcggttattggttggttgctgcgaacgatgacatgacagctgggtttgcaatgatcgaaccccctaacttgcagcagagcccattcagggctggaggatgatgaagatatttattttcgctagaatccgggctatgctgcataatttgcttattataaaggtgctgttgcatcctccctacaatatagggattggaaggtttttgcttgctcagtagtgccattcaaagatcaggtcagagcagagcagcatttgtcagatatatccaatgataagagggtccactatgctatctaaattccttcttgcatcggctgcgaccgtcgcggcgttcgctggcctagtcaatgcccagacaaacatcaccgagaaagactgcgcctcctcatccgagtactcaaagtgcaatagggatgtcgcggacaagtggagctcctgtcttcgaggatgtaacggcaatggtaactgtgccgtggactgtggctgcgactctcaccagaagtatatcaactgcatggcggagtcgtgctggaaccaggtatgactttatatacaatttggtccaaaggaacacccggcaacgtctatcataaatccatgctaacaatatcttaatcctcaggtctactcttgcaaataccagctcttcgtgcagcagtatttcgccatctgccccagcgccaaagagccaatccccttctggccaccgccagacaacgcgccaaaccgctgctcatgcgatctaggcaaagtcactcaaacgacgctctcatcgcgcaaccagcaaatcaaatgcatgcgcaacgtcaccgacaacatcagcgcggacatcggcagcatcccagacctctcgaaactcaacaacggtctcgacattgccaaccgcgcctcagactgcgcctgctgcggagctagcgctagtatctccgcgtaagtgaagcacaccaaacccgcgactcttccaaagcacgaactaacccccgaaccccagatcctgggatatctgcccgcacaccgaacccactctcgccggcgcagacatgtggggagtatttttcccctccgatctacccaatctatacacctccctgccgaattgggcgtggtcgtcttgcgactcgacgctcaaggatacgacgtgcaaggacctgggtttcacagatacggataagttctacaagcccggcgatttcccaagtaatggcacctcgaccctgtacgaggttgggggtacggttacggcgcctcctagcggtactgttctcacttggtctcaggtgtcgaccacttatactgttaccgcgactgggtatgacctcaaggctgtttctagccaaagtgagtaccgtgctacggctaccgggaccgatcaggcgtttgcgacgcagactgctgatagtggtgctggggctgtgaggaatggtggtgtgggcgctgttgtggctggtgtttttgcggttgttatgttgtagcttggtggttaataaaaggtatgcatggactgtgctggtaggtggagggttggagaagttgatgtttttgtggtaattcatgatgtgatatgaccggtttatggaaatggtatgtggcgttcgcagcttatgtgttgcatggctactttgcaatagctgtcatgttggttatgccggtggatggggagggaggactggatactactcaaatacgaacatccaatgcacaagttcctttctcatatcgcagccctagtgttgctgatatcttcggaaatggtcgaattacggtggtgccgggtggtgatgaatggctaggatattttgcgaatgcgattaatctgaaatggaaaaaaacaatgcttctcaattgtagcctgcagagcagctatgaaatgatatgaaaatgccccgaaaccgcccagaacaacgccagttactccgtagatatcggtatcaaaagttggaactatctcccgctagaaaaagcacaggcaccgtagtcagtgtcccttaggacgaaaaagcaaaacaatctacgcatttggtgcaagagacgagaccatcacgcaacccacgatgggagaacccgcttcaggaacttcatgaacttccagaacccaaccgcgtactcctggttaccctgcgggtcgacaacccgctcggggaacgcaataccggcaccaaacagcccggggatgtcagatgaacgaccaggctcgtggaacgtgcctttatcatgatcaaagctcatgaaaaggggcgcaccattcttcgagagagccgggagtgaggtacgggtatacccgacggcctggacgagatagtcacacgcgggcaagtacttatggtactgagcagactcgatctcctgaccaccagcgcagtcgatcttggccagaacctggcctgcgtgcgaagtgggaagcttatcgtcttccagctcggagcgagcaaagtccgcagccaggcccttgagaccggtgttgtcgcgcagtatccagccgtccttgtactctgcgtagcggagggggtgacgggtgaaccaactaatacgcaggagagggtgggaggtttgggcgagcttggtgaggttcaggatggcgaggatggcgctgtgggatgcgccgacgatggcgacggaggcgggtctgtctgaggggagggcttttgctagctcggtgggcttgagcactaggtcgaggtccaagcgctggatgtccagtccctggactgggatgggggctgttgtggggaaggagcctgtgcagaggatcaggcgggtagtctcgatagtctcaagatcttccgatgaattctgtttgatgcaaatggtccagttggaggtctggattgtgatgttattattagccttcatgatagacaaggagatgtgcaataaccactaaccgtttcgttcaggttggctgatttgacaaagccgtggcatgcatatacttgctccatcttcaatagaccgtccgtcaggccacgaaccatatccgctgcaaaaccaagggggcaggtagcttcttggtcaagcttggccaatttggtgaacgcattaggtgatttggtattatcgataattttctggaaaggctgtgtggctgttgcgaacgtttggaataatgcaaccttggtgttactgaagggtaccttgttagtatcttccggtctgcgttcatgtcgagaagtgtacaaacctaggaacttcgcgatacttgctatggactcgcccggcctcgaaagaaggatcgacccatgtgattgagcccagctggcgctccaacaagtttcccatgacagcgactccagccggaccggctcctacgacgaccgctgcgcatttccgagtagccatgttgggtggtgatttagaagataggcgtaagagtgggaaagcgaataaaggactgaagcgattcaaaggtgtggaatgaaaaaagagttgtaaaaataacggtgatttgagctactaaataaacagaaccgtagtagctatcgcgacgggggtgcgcgacgtttaaaaagggggaacagtcggctaagacccagactccagaggacgcatcatcggcgacaggacgcgtggtattcacacagataacgcaacataacgcaaccagcgtccagtcaggacatcgctatagagcgggcacattcattattcccccaatatcccatgacacatgtgtagctctcggacgagatgggtcgccgttctatcgacatgtgttgaccaatccatcctgttccgcaggtggggatctttgacctaaaattggcttcacagttggcggttatctcccgagactttcagacggcgactcattcggcgactcgttcgggagggtttgagtcggcgactgggccccactgtgcgcttgccgtcggcctgtcggcagggtcgtgctcagttagtataggaagaggtgctcatgggataaacaccattttcagggcagatcagcggttggactgcatgacgactagcagcagggagaaataaaaaaaaagtcaagcagctaaggaggccgtcggctttatattgtgctgttttggcgtcgattaggcagccttggcaaaatggcgtgatcagttttgggcttcaaagccaatcatcggttagtcagtttgttgtatacaacttagttggttagttacgatgtatgttgtatgttgtactccatacggagtacaatcctagttgtcagctaagacgtggtaactgactagttatgatattcttctgaaagggcatttaatactccacaaaacgaaaacatgatatcagagaacatccatatatacatcccctcatacagcccagtaaatcctcacgctcgcttgatgaacgtggtttgaccagccgggaaaccttgcccgggcccaaagggcaatcgaatcgccaatctctaactcacgcacttcatgtccatcaagagtaagccggccacgacccagagttctctcaatctcaagtgcctcgggcgagtctgcctggatatcatctcgatagtcccaaacaattatattgtgctgcatctcgctcacgtgggcaccattggattgcaatttgttgtggcgcggcaacagcagcgcatcttcctcggtatagtgttttcggacttgtccacgctcattgtcgaggatctcttgctcaattccattggcatacatgttcttcgtatgcgctccgtgaataacttcgatgtcaaaccaggtccatgaaaattcatacatgttgtcacggcatttcccactgccttggtcatgagatgagatattgaagactatcttgcggcaagggtgtgcaccgcgatgaggtaacggggtaggactcgagtcttgctccaagctctagaaagatatcaacacggccgtcagctaacttgggagcagataggcataccttccgatcgtagcagaggggaacagtcttcagcaaaacttgatcacaatctttttgaatgatccgatgttcttccagtttctgctctattgaaggccaatattccgcagcatcaatgatcatatcaatgagttcttcgggcagaccgcgtgggaccttccgttgcaacaaattccgaactttgagtacatccgctatgctgggattgaaaacttgaggtcctgggtccgagatacacgtatccaccccatcagaatctgtgccgttcgtgtctgcagagggttggccatgggaccggcggcagtttcctgggcgaactccgaaaggtaacatggtagtaatgagaaatctaggtgctgacttgaatagaaagacgtcgatacgtatgaaatttcttttcgctctgtattacctagcctcgggagctagcttcggctttgtttttgtcgactcgtatgtgcacctcaccccgcatgccacatggataaataaggctggaactaaagtacttcactttgggcggttcaagctattgatttcgttgaacgggattcaaagtaaagtgatgttcaacgtgagtaatatggatccgatggtggaaaggaaacagttgatggtcgacaacttgtacggagttacccgtgaacgttgattgttgacaatgacgtcagtgtccccagttataactagctgactttgcatagattaactatctccagggctggaattactacgtagatgctcaaattatgcatatctggtctcgaattttgtattcttcctacaatatattcaaatgcccttcctaacgcccatgagagatacaataaggcttcttttattttcagccccttctgccacccgcagctttgtatgcggcagcccgcttgctgcttctgctttctcgcttggccttcgatccacggcttttctgcttcattttgatggatgatgatccctcagtagcgcggtgaccctcgaacacgaaagagttgccggcaatggtactgttagcatcggccttcaccttggccgcacccgctcggcccaatagcctgttggcacgtccttgcatcgttttctgggcctcatctacacgagacttcttggtctcggggccggagggttcgcgcttcttagcgattttacgggctcgagtgacacgcagcttgcgggggagcataggcgggaagttctttccattgagcggaagcgattcctcaacaccattgccatcgtagaattggacataggcaaatcctttgccaacacgagtggtgctgtcacggatcacgcgcacgaactcaacgttcttcttgatggccttcttgtccttgcctccagtgtgggcgttgaaaatccgccagagaccctcctcaatatcggcgggagcgcgaaccttcttcttcttgccggtcttctcgtcctcttcgggagtctcactgtcaatgaaagacaggttgccgacaaagacacagcgcttgtggtcaatttctgaggggtgagcaaggctatcaactcgcaaatgacggtctaagaccatggtgccgttcaaggcggcgggagccttgcgtgcggcgtggagagtggtgtagacagcgtatgcgttggtgctgggtgtggtctcatcgaggatctcgcgcttcgcgaaggaagcacgcttgggaatgccaccgccactggcgaatgcaacagagcggaagcggatcgattcgatcttgtgcgggccggtggattcaggaagcgtcgaacagaaagaggccaggtgcctgagaagtgttttcttggcagtcttagatctgatagcctcggtggagacgttgcccaggaagacagtgcggttggacttctcaacttcatcggttttggcggaaccagtcaagctctcgtgcacaggtgcaggagcggcctcctcgtcgtcggtgtcttctgataccgatgctttgtctgagtcctcgccttcctcgccttcctcgtcttcgctaccttctttttcggtctgcttttgacgctttgcttgctcggacttcctcttttcctcatccttctcctcctcctttgcaatgcgacgcatatatgtctcctcgacatcctccccggcactgccacgcttgcgcttccggttctgtgtatcggtaggttgttcttcctcctctgcagcatcagaatcgctttcttcgccagcatcttccattaattcatcgcctgatgcagatgattcatcttcttcagcaacatcatcttcgtccttttttgcccgttgtgtgggcttgacgtacttgatcacgggtgcttgcacaggaccagcctatatatggtcagttcaaagtctgttaattgcgcctcaagacagacatacactctgcgcaaaaagcgaggacagtgttgggtccagagatgcaccaccgaagggaagagtggcagcggacgtgctggtcttctcctccgtcttggacgaagactttgactttttgcccattttgatgttcttggtctgtattatagtctaaaatcgagtggccaggaggtgggtttgttgcgattgacacttgcgccgatgatagctccgactttttttttccctttagtttctgcttatcgggtcttggcatggaaagataattatcacgtgaccaggaatacactcaagagtagatgttcctacagtatgcggtatatcagacgttgtatatgctagatatgcattaatattaaatatgcatgctttctgtattacttattcttcttgtctgcaagtacttcactctgtctatgtattccaggctgggaggttcttatttgggaccgggcggtaagctgtggatgtatgatgcacttataaaccatctaacctagtgagactgatgaacagattctttgttcttcattccttccttctggcataaaaatgcagtatcaacatattattctacaggatggcctgtctctttccaactacgtcagatactatatcacgtgacttgcttttttttcttcgggcggtgagctttaccctcgccggaacgcaacgcggcagaatcggcggtcactcgcttctgttgctgcaccccatctagcgatctgctgcttttgtctgttgaaaccccctctttccgctgtgattttccatccctgatcattggtttgatcttgatcaccgtccctagccacttcttcatgacgccaactcctctgcgactcggtaccctcgtcttgtccgcttcctagccatcctcccctcgtcctccagagtcggtctgcgtaggattcgtcggaccgaaagcttttaccggttacaatagtggtgatacgcgtggacctggaattccgtcataaatcgcgtctcaggaacgcggtggttttgggaatcgtgctcggtcgcgagcagctgtgctcattaccggcgtcgctcccggcgcattgttgaaacggtacgtcgcttgaggttctacatcaaccacagacctcatctggtcattttcgtggggagggagcgtctctatatcttctggaactactgtgatcggtacacttgctttgcgcggcctctagtccctgtgctgagcgactgttaccgaatctgggggcgttcgatgatcaatctccgcaccaccgccttctgggggcgctgacctatctcgcacccaccaaccactttttgcccaccaactccgtttttaactggttttgccgagttgatatggcaattgagctaattctatctgtggtttctccagattctcgctcgaaacaccatctggtggatcggtgaccttccttcctctcacgcccgcggctaatctcaacctcgctgcaagcaagcaaccaccttatactctccccttcaaaccttcttgtcttcattcacatcgtgttgcgccagctctcttagctgcataaatctccatggaggtagccgagagcagggaacaggcctccgttggtcccacaacgggggcagagtctacattccctaatggcgagcggaacccttttctggatgacccgctcatggacgatgatggacgctcaagtagcttgagtgagatcgacgatgtctcggacaacgagccgtccgacttcgaggatccaatcaaatcagacaagccaatggagaatgattcggaggccgaaaccgagcgcatcgaagattctccacacaatatccggaaacatgacattgtgttgagcgccgctagtgccggaccaagccctagcaagcttcatcaatctacaacactcgatgatgttgacgatgaagcacttgtggtagacgattctcctagcaaaccgcgacggtcttcaaaaaacaatggcttggccgaggatatcccagacctaggcgacctaggtgattcggagctgccagataatctcaaaaaacgaaaacacgaaactgtcgccgaattaggcgacgaagagcccacgaagaaacgccggagctcaatcaagagtgacttgagtgacccgatagacgatgatacccccctatcgcctgagccgctcggtaatcccatggatatcaatgaaaatggcatactggttgacgaagttcctgagtcggatctcccagccccgccttccaaaggcaaaaagggcaaaaagggtaagcggaaaggaagaagggcccaagacggcgatgaggaagcagaagccggggtcgaggccacattagagtatgttgctgatgagattcgtggagaagacgaggagcctacggaacgagtagatgagcccgatgacgcagaggcgattcttcgagccgaagagtgtaagtttatccctttatggaccttttgggtgcaacatatactgatgcctagttcagcggtgaaaaagatgtctgctatggattcccttgtgacactggagaaagaatttgcaacgttacgtgacaagtaaggaatttcccccatctctcacatgcttcgacgctaataatcataggatttatgacgaacggatatccaaactcaaccgcgagttggagatgcttaccggtccgaacccgacgcatcctgagtacttgcggcagatcgaatgtgtgcaacgttaccgagatgccaagatcaaatacgaacaaaacttgttccgacaccgcatgaagtcactcatgcacaagggtctggccgagcgaacacaggctcatagcacatactaccagcggattcgggatgcgcgcgagcggcattcaagtgcagtcagcaaacaattctatgccattcagcatgatcgcttcaagacagacgagctaagcccgcaccatatcatcccattccccacccgccgctcgcagcaaatcgcacatcaggccgcatacaaccaggaggtttcaattatggccggtgtggccaagtatgttggcttcccggctgccccgtccttgatgggtgcacggccgaccgaacttgatgacgatcttgaaaagatgggggtaagtcatattcacattcactatttggtcagttgctgagagcaggtcatagattcatatcgagtctcgcgcttcggcaccacggcactcatccgcaataccgtcacggaccaccatgtctaccatgtcttccaatgctttccgttcggccgcagaagaagcatttctagaacaaacaccctgggcaaacccacaacatcccatccatcagcaacaacagcaacagcactcgcagccacctcgactacaaggccgcacatttgagcatccgcaacaatcatcatatgcaacgccagccgctcaaaagcgggtagtagacatcaatgcgcctaatggatctgcatccaccattcccgagaacgcctctgctgccaactcatcagccaacaacaccccttacggcatggagcaagatccaagccgtcaaacgcaagggcccttccgcaacccagattatgacaccgatcatcgcaaatctgggttccggtcattaagttcatctcccttggatgtgcgtaaatcacagccgcatatcaaccatgccctcgaacaccgttctcccataaccgacgcaccatcccacaatcacatattctctccgccttctgcacgccaaggcttgtttcaaccttcagccgctccccaacgggagacctcgccatccctcccgtctaaacctgttgatgtacattaccgcgcccatcaatccggaatatccacaggtcctggttcaaaccatatgcctaatcgataatcgattacctttggcgattcttattgaaatgacccgtcagcacccttcttaataccccgagagtctcctaccctcctctttcatgcatcttgtgcacttttcttctcctgtgataaatcctgtgtttttctactctccagctcttgctccagcagcaaatgtatcttgactgtcattttcacgcgtgttgcatgaatggaataccaatttggggtcttgtccttgagtttcaacagcgttaacatgtggggtactcctgttgttattacttctcactttggattcgaagactttatttgaatggaacggaatctggttaaagctgttattattttatcatccgatggggtgtataaggtctgaatttgtttttttatgcgtgcggtagagagatatcttttgcattggagtttctttttattttcttcgttcctctagtgtcatctgctctgtctaatgatgtacatacgacgttcttattttatatcataaacttccttgtagtctatgttgcgaccgaactgatctatatatagcggggctgaacgttggaaccatggcggcgccactatctatcctaagtggagctgatctgatgctaagattcacttcactgattcgcttgaccctcaaagctctcatggatgcattcaaggttagagccgagagagagtaaaaattattccatcatggtagactggttttcgcgtagctaaaagatctatcataaaaagtatacatccttctgggtcctatgggttttaaactctcaacgatgaagcaggcagttgataacgtagctaataagatgtgacaggagtgacttattttagtcaggttttcacatacaacatgcaggtagctactgttctgctaatttcggggtagcggtgggaagaaccgggcaggagcggttcccagttaggaaggtgcacctaatatttcaggcaaggagtggtctgatccgggtggtctgaccgaagggaagtggtgtgatctatggggcgggtggaggtatgaacaccctctctctctctctatatatttccagaagcctaggtttgcatattgttgagggattcccagaaattgaaaatcgacacctcatccatcaacgcatcaatggcatcttcgccgattgttattcctgctataggatcctcggtcggtacttcttgcggtggagaagattcggatgccaactgagggagcgctgtttgaggagtatagttggggaaaatgtaacggatggcttcgagaaagatacctcggaagaccgaagagcaggggtgagtgtgttgcatctgttccaagactatcatgcagacctcaattttgttgagacccagacgtcgggaaacgggatccggagatttgcagttgaggaggtggacgtgcattgctgggaccaacagcggtgccctggagtgattgtcagataagatatcatttgcagaagagttgcacactcacgtcatagagcctgagaatcccaacagcttctcctgtgccagactatcaaggatggcattggtctgtagcgcagccatgttgatctgattgcggacgtgggtttgccatgtgtcttggcgagatacgggcaacccttctgggtcttttgttatgaaaggacggtaaaaggtgattatgaatgctcttttgaccgtcagaagcagttaaggatggatatggcgtcagcactcactggtaatggagctgcaagtgatacaaggaaaaggttgcaagtggactttgtcttgtctcctgatcttcgggaatttgaaagcgcaaaatcttttgctcaagggcttcaacctgttggaaagacgaactggccccaaagggttggtagcataaggtgagagtctcccctagaagctgagtgagttgaatcattgtcacccaatagtctgctagctgcggtaggtccttcgggatatatattgctgatatggattcgggtaagccgacaagatcacccaacatatcatccgcagatggcggtacagtgttacagtcattcatgttgatcctcaatggacgacccattgtgagacttagccaacggtctcgaaagaagcagatccaccaaagacggcgccaaagacgctgttgttgcccagtgataggggaattggcgcagaccgaggcagagaaacgatgcagacccattgtttgacaaaggctgatggcaataccaagccaaaaccacggttgggtgtaggtatcagcctcggagtggtaaaatcccatgagaagtgctgattgaaggagaactgtgttgtctgtttcacccccattatgatgcaggcactaagagcaggccattagcaagcataactcggaaatagaaagaatgctagcttgctagcttgcgcttacctttgcacgagcgtacatagattccttcatctctttcctagacgaaaagccctctgatttccaagtatcggccggaagatgctatatcccgcattagcttgactgcagttctactcggaggaggtaggctttacattcgctgcagcatagaaaatgctccatagtaatatcagattgtatggctgaccatctccactgggataaaggtgtggaagtgtcgtagcgtcgatcaccggcataatgggatgcacatgatgaaagtatgcccggagaagttgatcgcagatctcttttcggggcatattgaagcatcctttgtactgcaggtatgctttatcctcggaagatagcgaaacggatgttttggaagtgagcaggatatgccttggtgcaggttgctgtgaaggcgagcatgcatcgaagatagcgccaaacccaggcacatcaccttcagttccaggttagttttgggtgaaaacactcgcgcggtgactacatacctgtgtagaatggcgcttggccaggtttgtagttgtttttccggaggactttggttgcaatttcaacgccagtctgttcttcatcatgactccgagaataatccgggggattagagacactccttatcccaaccagctcagggcggtctttatgcgcaggcggtgcagttgggaatgcatcaagtgggagtgcagactgtgatatcaatccattagaacctgcgctaggtggactgttaatgacagacgcggttcgacgcgtgtgcctttcgcgtatgctatatctgtcagcgataagcttctaccaaatcgaaagaaaacctcacgtttgggtcttcgtcggcggaacactacattctctgccatcttgcgtacaacctatacacggaataccggtaactgtcacgctacagcggactttgcgctgacggcaattctgacaagcagcggccgatctatagcggcgtgtagacatggcgaagccaagtattgatctatcggtctgccgagaaggtcgggtcgccgaattgttgtcaattaaaaatgatccgaggtagccgagatccgtttcttcccgggagttccgaggtaagtttttcccaagaattatgaatgaccctgagagagggaaagggggctgtatttactacgaaaaagacggaagaacagagaagaaaggaagaggagatcgaatttgaaaggttagagatatatcttcagagacttgttagttatataggatgtctgaggaatcgtgacctaggcaaatttttcaaaataatctttaatgagggaaagaaaacctgttgcattcgctagctaagagagagagaagtccaggtggggaagtcaggtcctatctactctgtacctgaagcaaacaacggtctcaacaatcttcaaacaacatatattcaagttaaacgcaaaaagtatctatataccctctatataccctctataaacttctatagtacatcagatcagatttacacaagggcaattccagtaaaggcccggtcatcattggagtaaatcttctccttgttgttgccatccatatcggtccggtagatagatccgcccaggtcagtaagatagatctgagaattggcgggatctaagatcaaaccgattgcctcgttcagatttctggtgatgacatcatatcccagagcggagctagctggcagaaggagaccttgttcactcaactgagctttgttcagtgagttgccgatcgggagttcaccacgatcggtccagtaaagtgtgtgagtggcttcgtgcacctcgagatcaatcggctcggggagatcagctagaacaacctggacatcacttcgagcatctggtgactcgccctcaggggttgtgatattggcgcagaagatccggcctttgccagccttcgagggtcctttctgggtccaatagaatttaccataatttggcaccacagcaattccgacgcaccagtcggagatgcggtgctgtggattcgcttcaccgccggtgttatcaatcaaaacctcgagattggagccgtcgtaggcacaacggtagacgcggcagccttcacggtcacagaaatagacagttttcgcctcggaatggaggactatttgtttcggtgtattgatagttcctggggcaatgagtgttttgatgtcggttccatccacgttggcggagtaaacgcctccgtcgaactttcctggagcgcccatgcaagtccagaacatgcggccagagatcgggtctatgatgagcccatcaggcaaggattggtccttgagaaccacgttctttagcgtgccgtctgcggcaaagcgaacgatctctcctgatgtcacgccgggtttgatggctgacagtccaatgtccaacactaaaaggtcgggagtcttgggagtagaagtcgactcgctagcaggatagaggccacccttcgagcactttgttcccagtttgccctggtccaggtaattggccttcaaaaagtcgaccgtcttctcgggggagagcccacgttcctgcacataatgactctcaatgaaggcgacggtgtctaggccaacatctaggcaatttatgttagcgaacaacttcccacaaaactagggagacgagtgaaggacttactgtccattgtccggcagggaagactctttcccttgatgaacagttcattccacatcgaatcaatttcctcaggaaccgaaacaccctcagccaagatagtcatgacctcccgcttcacagcagcccacagccgattgaagatgaacccagtggactcctttcgcgcaacatatggacttgtggcggcttccttggagcgctcgaccatgaaagggaagatctctggggcagtgtgtccatcggtcatgagctccacgatcatacacgacggcggcatataataatgcatgttcagaacacgcttcttggtggcatccgagatctgactgattatctcagaagatttgtatgatgatgagttggaagccaggatgcagtcctccggggcgagggcctccaattcagcgaaagtggagatcttaagttcgagcttctcgggaacagcttcaatcacaagccaggcgttttcaacggctttcttcatgtcttcgaaggcttcaaaggatccggggatttgctttgttttggcggcgtaggattggacattttcctgaatgtatgcaattccgtctgctcgctgctgcgagctagggtctcgaattcgaacatcgtagccggctgaagcccagatacaacctaatagccgaagtttgtcaacacttctatccattgaataacacgtgggatgggatacagaccaattcggcggccgagtacgccggcacccagaatggtgactgggcggttgcggtagttgctcggaggtacccagtgtgatgccatgctgcgacgcaaagtgttcatcaagtgtaaagtgtaaaatgtaaaatgtcaagtgccaagtatacagggtaaagtgtaaagtgtaaagtagcctagttggtatcttcaatcccagtggcggatgggttccttatatgccctatcgttgccgccattgtcactttgtcatcttgtaccaccctcggaataccagtatccactatcccgaccgaaaggaagatcaaggggacatcggccccgccagcaggccgaggatcggtatcctaatttgatcctcggaaactcccgggccgtggaaatatgatgaacaaggaaattcttcatcaaaagaggatttgtgcaggtggatctacataatcccaaggcgtcattaaggcaatgcttagtgtgtgtggaccaagtcgatctctttcttgggatccactatcttatggaggacgatcccgaggtagtttacctcggaacccatatagaatcccctgggggctaatgccaattagaaatttttgataggatagaaaagaataaatggcgcgtatggttcctctaagactacaatataaagcatttgcctctagttcattgtcgcgctgaaagcacaaccgtcattgatattgcatccttccatacaaaatggcatcttttaaacaattcgaggcgagcgaagtagcagctcacaacacaaaaaacgatctttttgtcatcattcatggaaaaggtaatctttccctccttgagctaccttgttcaatcttctaacacacccagtgtacgacatcacagactatgtgcgagaccatcccggtggtgcggatttattggtagatgtcgccggtacagatgcaacagttgcgtttgaggatgtcggtcactcagaggatgcatctgagatcctggacacatacttggtcggcaacatcaaggatgcgcacgaatttgtccaacccaaaaaggtcgttcgtgtaatcaagccaatctcttccgttgcggagacacctaagaagtcatcaatcaccctcaaaacagcgagcacaattactgccacatttgctgcaactgcactggtttacgtctgttcgaagaatcaccgaaccctggccgacttctgcactaagcactccccggcgtccctacggatctccgaggtgcgtgttccattcggaaacattctgcatggtggattcttcagtggagtcactgctgccactctggcttgcgcgactattggcggtgttattggaaaccaactctcaaagttcaccaaagtcgactctggtttcaccaagtaccctccccacatgaaagcatcgacaatcaagaagcaagacccgcatcttgtgaagggcttcctagagcccaaagtctacaaaaaactcccgctcgtccaaaaagatcaactttcacccaatgtgtaccgcttcgtatttcaattggccaatccacgggatgtgattggactcccaatcggccagcatgttgctatcaaagccatggtcaacggagctgctgtctcaagatcttatactccgacatccaataacctggattttggaaaactggagctagtcatcaaatgctacccagatggcattctcacaggccaataccttgagtccctagaagtcggcgacaaagtggaattccggggcccgaaaggcgggatgaaatatcacaatggtctctgcaagaaaattggcatgattgccggtggaaccggaatcaccccgatgtaccaacttatccgggcgatttgtgaagatgatcgtgatacgactgaaatcagtctgatctacgccaaccgaactgaagaggatattcttcttcgtcgcgaattggaagcctttgcgcgaggatatcccaagaacttcaagctctggtacatgcttgaccatcccgatgagaattggaaatacggaaagggatacgttaccgcagaagtcatggctgctagattgcctggtccagcatctgatactaagatcatgctttgtggaccaccaggtatggtgaatgcttcaaagaagagtttggtggctgcgggcttcacagctcctagtgctgtcggaaagatgaccgatcagatcttctgcttctagccctggagagtgttttgattacataatctctctttttgtttcatgtttatagatgttgtatattagagttagaggaacttagagctgtttgtgaatttcatatgtttctattttgatatatttttgaaaatgcttcatcttaacttatgtatataagtcgattgcgtgtagattactacttgtagccttattcgattatcccagaggccatagctgccaagttcttctttcatcgatatatttgtttcatacaccatgtcccttgtcatacataggaaattcctttgtacagtttatgatttttacttatattgcggagtgtgacatgtctactccgtaatattatccattatcctttaaattataaggaaaatctctgaacaattacatgtagaaagcactcttgagaaaaagcatcaaagcaagacatcggagtgttaggacatgtaacatccatcccttccaagtatagccaggtgtcacatacgtggccacttgctcttgtatttcttcgttctagacttttcgagaggtctgtacttagagtggagtcggaagagagaataatatcatttcgggatcacatccccatatcgaaatgttccgtgggatcctgtgccttctgtagctggtttggattccgaaagctactgaatagggatatattctgcttagatccacagttgacagctacctagttacctatgttgtccatacgttccgaagatgagtaatgtctggtttacagacggagtgttgaaaatagataaactatattgagctaaatgtattttgcagatcaccgaggaaccaggccgttccgaggtacacgggagacatccgagatagaaaagagccaatcggaaaagcccatttagacccacaacccgaggaaataaattcccgatatatgaaacggccgggatctgtcgtgataaccattgtgcagttgatatataagtttagggtcctgaattgaactggctagacaaaaagcactcaatcacaatgtctgcaaagcaattttatctccttggagagccagtctcctccgccaagaacatcgatgtcgacccgaaaagtgatttgggtgaactcaaggatttgattgcagctcacttcgcaatcgttgagccaaatggtaagtttgaaggacttattctgatttcaggtggtaattactgacgcgtgataggcatcggtttcgaagctcaagactcccagctgaacgaagtctcggagatcacttcagccaccactcccgtcgccatcaccatcgatggacaagcggtccgtgatcctcctggcccgaagggcctcccctatgtcggaaatttcttcgaagtctacccagaccatcttggaaaccaccagcgtctcttcgaacaatacggaccggtcatcaagacagtcaatctgggccgcacgacttatcaaaccaatgaccccgctatctccgcgatcgtttttgccgaatctgattttttcacaaagaagattaatgaggcccatccactctatcctctaaagcagcctagcgctggtgttttccttggagatacggatactcccgagtggagagtcgcccacaagtttttaccgccagctctcggcccgaaggccgttcgtcactatgcaccaacaatgcagaagacagtggaggatgccttcaatgttttcgataaatttgatgagcagggtgaagcctggaatgtgtatcagtatatgctgaagctcggagctcaagcagtgggcaagctcacgcttggcttggatttccaccactttgactctccggacgcgaatttgcatgagatggtgcatttgattgctgaacttctttctctcaataagaaagtcgcatccaagggagattggtatggtaaactgccattcggtgatccacagcggctccgaacgatcaaagacagaattgcaaagatggtggaggaatccattcagaaagctgcacgtggtggtgttgaagacctaccgcttcaagatgcagcgctgacagcgtctaacatggtcggtaagtggctatcatatatcaccaaatcccctgcttatatccatggatgctaataaacgcttcagactatgccatccgtgcaaccgacaataaaggtgagaagctgccccaggaaagcttgatttgggctctcgtcgtcgcaaccgcagccggcttcacgacgaccagttcacttctttcctggctcatttacggccttgtcacgtacccaggaatgcaagacaggctactccaagaactcgttgacaatggcatcgacgaaaacaccgagatcacagcagacgttacagaacgtctcgatttcctcgataagtacatcaaggagacccagcgtcgccacaacccgagtttccaaccgggacgaaccgctaaggtcgacctagtgcttccgggagggtacaagctcgccaaggactcggttattctcccggcgctgcaccacatccacaacaaccccgacctgtgggataatccttaccagttcaaccctgatcgctgggacaccgaggcggtcaagaacagacataaggctgcgtatattccattcgccaccggcccgcgtatgtgcattgggttcaactttgccttgcaggaagttaaggttttcctccccaagctcatcttccggtacaaattcactcgggagggcaatgaccccatcgagtatgaccccatgttccagttgattcgccccaataacctctatgttcgtgcggagaagagggtgaaatggcctcctaagacggagacattggcaacagcggatgtttgagagcatcctagcatagatagatgatagatgtttaagtaacaggcttaggcaacagcaattggtttgagaatagaatgtatatgagaatagagaatgtatatattatctcgtttataacgaagaacttcccgtctagcaaagcaaaggtttttcttgagatgtataaaagcgattttatccgaaattctatttgactggaaaatagtatactcgtggcagacggtctttgcaagatgaagcatagctaccaatgaccgcatgagattgaaggtcttgataaaatgcagtgaagctataaacggatattcattctctcaaaagacaaagtgagggagatggaggcaccgtagatgtcacatattcgaagattaaacccgtaagatggatacactagaaaagaggtataatgaaacggggactaaaaggcaccaaaccgaaggcatgtgcaatatagataaaaatgcccgaagaatcctacctggcattcaaattgcagaaaaatgaagaactcatctcatgtcatcatcttcttttcatcgaatggtacaaataacaagattatggatctgaagtagtaggctttgactcagatgattctggtgcgtcatttgctggcttcagcactgtgctttgcgggcgccacttggtgaggaccttgcccgcagcaggtcgggattcctcgtctgttcgtcgcatgttagatatatatattaccagtggatattagggagggggtatatttacaagtctggtagacatcctctactgtgttcaagcacatctctcgtgctggaggtcggaacataatcaggtacctaaaaggaagtcagcaagggagttcatgatagtggaaaaagtggaagacgacatacatcaatgattgaacgcaaaggttcacacgttccggatctttggccaagctggccacccgctgagtgataggaattgtgatctcagggacttcactgagaaagcggaccagcaccttgatatctcgagagtccaaataagctaggaaaccatccaaaagtcgggtggcccaggtatcgtagttaagagctacagtcggctccgagtcttcctcggtgtcatcccgttgattggcagcactcttcatttgaattcggtcattataccactcttcattgagccagataatggcaatgttaagtcgccctcggaaatcttccaagatgaaccgatagagcgtttcgcggatcgagtcggcaatagttgtttgcctacgtacggcgtctcccttggttggctggtcattttcgagaccggcaggtgcccgtgtagccagccgagcaagaagaacagaccatgcgtcccggtcaaatgtactccctgctaatctagcgaaaccgagcttttgttggcttagacccttggcaggcgcaggcgatgtttcggctgcgttcaacattccgaacacacgcgcaacagcactccgtccgatttctccagcctcttcttcgctcaatggaggtggttgtggcaggacaaagggacccaatgagaccaattctggttgtagatctgctacctccgccgcaacagcactagcctcttctgaaataacagatgctacgtccatgggctggtattcaggctcatagtcatcatcctcatcttgggctgctgctctctgttgtagctgccgttgcaagttttgatcctttgtgattgtctgatatcgagtacgaacagcctaggtcatgtcagcaaaggataaggcttcactcctatgaaggtacttacatcgacagcttgtgcaagtgttgaatcatgtacttgcgacaagagcggtacaacaatcttgaggactagatcaattggcagctgttttacgtcgaaggaggaaagtccggtgtcctcggtcaaggtgaagagtcggtcaaagcttgcaggccccggtgccattggaggaatcttgagcatcgggggaggcaaagcatggagacgcgccctcttagcgttgtcaagtccgtcggtaggttcatttggcaatccacgtttccgcgaagcgtcgtcagtggcctcaagtcgtgattgcattagacgttcaatgtacatttgcatccgacccgctaaggggtggttcgggttcctatgatagtcaggtcaaaccacatctttcgcagccaggatgacaacatactttttcaagatattgataagcagagctcgagctgtgcgctccatggacttgacgctgacgcgaattgttggagtaaacggcgcgtggacgtgtttcgcgggataaaactccaaaattgtgttaattatcttgtttgctacggactgacgtgtccggatgagaggggcgaggcagtttaatgtcgcattcacaagaagagcatcactggtttgtgttagcatcttgatcaactcgtaaaataaattgatcctcatacctagtctcttcttggaaaacgccaagtagtcgatcgagaagacctgaggattccgcttccaggttcggtattgacagaagagcatgattccggggaacaacggccaaagacgtctcgttctggtccggtcgctgattgaagttagtatcgacacatccaactctgtataacccgccaagcatacccttgggtccgagatcaatccaggcgtctgaacctggaccacacgctggatgaacttggcacagcaaagcttaaccgggcatggaaacgagtccattctcctaagtatatcttgcttaatggcagtcattgtctcccatgacttgctatcctgtggatggttcactctgtgtattgttagctctgcacgaggtttacgtttgtaacgcgctcgtgcgtcgcagccacgaaagattgggaataacctacacatgtctgaagacaagaggatacaaactagctgaagtctgtaccaagctctgtaggactgtcgtgtctgtttccggcaactctagaatctcgcggatggtctgtaggacattcggtgccagctgctccttctgcgcaacagctaacattgggctagcaaaggtttctgccaggaagtttgcaccccatcttcgcaattccaaccgtgtactagctccgacgatgggaaggataccgttgacgatctgcgggtagaaggcggcatcgccgagaacgagactgcgggcggcattgagctgggcgacctggtcgatgacattgtccatgggctgagccattctagctctaatgaggaggtatccggtacgcaacggacgtgtcggattcgatttggtagactaggtgttgggggaagggaggacgttgatgggtggatggagaacacggatgcagttgcaaaagcaacgcgcataagcttgggtttgcgttctcagaactaggaaatagcggcaaaataactccgaagttggagagtgttagtggttatgcgatgggtgctgaaggaggggcgattgggaagtgaagttgatggtcgtcaaagatgcgacaaaagctgcgaggcctcaaaagggcggctaacaaagcctccgatgtatgtgagctccgtatctctacataaacttgatgcaccgagctcaaagtctctgtatgcttcaattgcttggaatttaatacagccagtgtctcaattacaatcaaaagtctcgatctaatctcaatacaaacatctaaattcgcatcacgttgtctgggcctccaacgccaagacttttcctccggatctgccttctatgccctcaactttcttgtctctcacgtctctcttaacaaacattcccaccatggctaccggaatgtatgtatagtgtctatagactcagagaggtctcatcttgctaacatcatgctctgtgccagcttcaactctacctactacggcaaggactaccgggccggtgccgccctcctgcgcgcccgccgcccatatctgtttaagaataccctcacaggctttggattgttcgcatttacaattgcagtctgtgagtaaaccctgtgtctgataccgatgtttttccgcttcagcgctgctttatctccgaaccgcagacgatcatgccaccaggacttggccgctgagaagcgggctcgatatctacaagagacaggacctcatgctaatacggcttctattttcagatacatacaccctcaaggctgtcggccaagaagactttgccgatgtcaaggtccccgatgcccccgccgacaagaaatgaagcacacccaacataccggtacttggggatcggttaacgctgccatcggggttttggagtcttcagggagaccttgtttttcagatctgtaggattagcgataatatcagcatttgtgctgccgtgcacagaaggaatttggaatataggctgtacaatgaatttcggctacggatgttatttctatgtgccctaccaactccaaaaagaaaccccgacttctcctcgctactccaactctgaatcgccaatgtcacgtagtgaaggtgacaggcagagttatttaatagccttctgagaagaaaggcattgatatataggttaggtaactagacctagagtatattggtatggttttgaagcatagctatgccagagcgaatcacaacagccaacaagacaagaaaactcaacgtgaatctagaaaacaaatctctactcggttcgcagaacacgagggcccttgtgcttggtggcacgcttgcgcttgaggcccttgtcgaaggcaactgcgttgctatgatcacggccgaggttatccaggtccttgaccttgtatagacgaacgatccagttctcgctggtgaatgcctcttccagtgtgttgagttgtgggctctccttgggaagttttgtgttacggacacggtccatggcttgaccggccgggaagagcgactggaagttgtgataagacatcttgtacctattgatggggttagcagtaacttggataattaagatgtgaggttcttacatcaggctgttcttcatggcgggagtggcttcttcgtcgacacggtactcgccacgagcggtgaagtagtcacgctctttcacctcgtctggccagataccctcggcaatacgaaccatccagaggaacttgttcaaatcgtcacctgagtagccgagtagtccaccgaacacgaccaagacgtagtcgacatcgtgctgtcggagaatagggtagctaacttcctcgcgcgagctcattgccttgccaacagtagcaatatgggtgttgttccaggtgttgttgtcgaccagggtggggcggtcagccataccaccgatttggtatccataatcccaccaggacatgatcttggcattgtccggggtgttctggcggagccaatagtaggcctcacggtagtcatcgatgatgaattggcttccatctggaagcttgctagccagaaccacagagggagaggaatatgcgttcgaagtaacccaggtgcagtgtgcaacgaacagaagcaagtaaagagtgaccgaggctaccacgacagacttggaaaaccaggaatagataccgacaacaggattccgggttgaccgaagtgacttatcatccgtagttgccttagccttggtttcagtgctaggggtcgatgcaaccaggaagttatcgaggatgcatgacaaggccagagcagccgcaacacacacaatgggggtcagggtgagcatcagacggaccataacaccagcgaagtaactagcaaggacggagtagatgaccacaaagacatgctcatccttgagtttctggaagcacatgaacactccggccgggaacagccagatgaggaagttcaggtcaaagaagaaggcaggccaggcggtgggctggtgctcggagacggaggcaataattgggatatgaatcttggcatatccggtatcccacagagagtagaagcgaccactccagggagcaattacccctgagattgatagcaggacaagaccaccaaatccaaggccaaacgtaagtaagaccatagaagtgaggagcttctggaactgcttgccgggcaggtagcctcggatgaactcagcaaacgcaaccaattgaatcaacccaaagacacctatcaaatagttagaatgagacaacgatatggcttagaatccaaaaaatcttaccaagtgcagacatgtggtcactgttgcgaataggcaggaaaccgacaaaggggatctgcatgcttcccaatgttcccagggcgtaccaggtggtgtagctgatgtagacacgggtgctgtatcgtcccatgcacagaagaacaaagacatgcagagggatcaggttagtaatgaagacgtatccaccccaagcagaaaccatatatccatagaacaatgcagtcaaggctccccacatgatcgagccgttcttcacagccttgatccagaggtagaatgtgaacaccaataggaaaatggcaatggcttcattatcgtagctgcctgccacagaccgtgagatgtaaccgggtgtaattcccatgaaagcagcggcgagaagacctgcggaaggagagtcggacatctcagaggtaaggagatacatcgccagggctgttagtccagagaatccgggggcgagcatgacacagatgtttcgaatgtcgacggggatggtgaggagacgaaggatgtggtagatcacgccgctggtcaccatcaggccagggtacaatgtgccaccagtgacacgcccaagagggtgccatgttcctatagcacgagcattcccatcagcccaatgtcatttatagtatcatgcggaggacgtgcaatcacggggaaggggccttacggtcatcaaaccaatcccagaagctataaaagccattttcgatcaagtattttgtcgcacggaagttgaaccacggatcgactagagtaagacggtatcaatatctcgtttgtttcgggggttatcgaggtggccaccgcattcagtgcagcaacatagggaaatcatacattcgtggatgatactttcaaatcctaaaatatagttagcatactgatcataaaggaactcaattgggacatactaatgacactgaacaagcggctggacaccgcggcggcggcaatggtacagagaatgataacccgcaatagaccgcgcgtattgcggccggagctgcctttcaacacaacatcaagcgaagacggggccatgatggccttgaaaacggagcgaagtccagggtcagaaatcaaaatagaaacatgaaatcaaggaatgaattgggctgagatgccagtggtgagggccgtggagaaggatgggaagagcaagagctgcgcaaggtggtcacttctgaaggtcttggcaccagccaaaggcgccacctccgattgctccccgcaatactacgactcatcactaatatttgttagagctcttttgactagattttgactcaatatacttgccactattgggtacatcagtattcctacagccatctacacttcatctacacctcacatgcccacatggagctgcctttgctgaccacggagcatctctcaaagctagtggcctccaacgctccaccgtcccaactcttcgaggccctgtcgcgatatgagcttcaagcatgcctcatttctaccaggggtgacagtgctaacacaggcggtagtgactctacactattgagcctattctactcgagcttctttctcatccatcttcttaccgaccaagtgttagttgcttagcgagtactattggtagttacgacactgctaatgaagctcgggtcccaggtctgaagctcgtgccttaacgaaacgaattcctgaagcactgctgcaacaggatccttctctacagaactgcttgactttactgcgagcggtatggcagactcaacacggccaggtctaccaggtactccgaggactaccatggccagacgttttgcagccattggttcggagatatgagagtatgtttctcatcgaaatgagcttcttctttccgctggatcttaaattgaccaatgattctgcaattaggtttcttccaagacaagactttgatcgcagtgagcagatcctacgaagctatacgactagcgacagcagcaacccaccttggtcttgaccaaaatcttgccaaagaggaagatccaaacataatatcgaatttcacgaaatatggatggacatgggatccggaatcaaagctgctgtatcccaaacctatcgttgtatcgctcgcggagcctcagtcttccaacgggatccataaggcaatggcaatgctgggaacgcgtgcagggtaaatcttgcttggacaacgaaggaatgtcagttatttggtagatccaaacctggactacaatggctacgtcctctgtcctacggtggggatgcgaggaccgagaggaacgctaaaaccaactttggatattggtctgatacatactgggacaaccggtaacgccggaatgtaacacgatcttttgctcttgcttgtggtccaactgtagtgtacaggcgcatggcagcccagggtatgtacaggacccagataaaacgtctaaaaatgagaaacaaaaaatcgttccatcttgcgctcgcaatgccacaactcggggcagatcaaacccaaacaatcgtacaataagatggaactgagttgagcaaaacatgtctaataccctgggggaggtgcgattcccgcaaagagatcattgcatagcattcctcctctatgccatccatcatatttaaaccttagccttcaagaaggcctccaggtcgaacttggggtcctcgaaattcgtgataactatggagttttggtcagtacttcgggttttgaagatattcggcggctccggatgtcgttgcatttgtctgaattgcatcatccgaggggaatcaaacgtacgtccgctggtctgtgtcttggtctcttgctggggctgggtcttcttcttgtattcggccttggcctgctcgatcaggcgctccttgcgagcatactcgtgctcgatctctgcgcgcttggtaaccgagttgagagaggactggtggtaaacaccgtaaacgagaccagcaacgagagccgagtaacggaggacctgtaggttgggagacgtggttaacggccgtcgggggagagggtaacccttagccggtactcacattgacaccttggctagccatttctgcgaggtttccggaagacgggaattaaatgagggaataatgtgtgtaagaagaaggaaccgtgcaacaggtgtcaaccgtcaatggcaataaatctccaggttggttaaatggcgaggttcagttcatgttctgcgcgcgcgagtttttccggaccgctccagagttcccgaagacggagattagtcatccccgtaaataaacgcgcagtggaggtactacacttggacgtggacgcatctggtctaaccctctataattgtacaagatgtcgatgcaacagcgcaaggatgaaattctcgcaaagcgggccaagcttgccgagctcaaaaagcagcgggagctgcgccagaaggaattcacctcccgaaccagcgtcggggatgcttcagaggtaaatgcggcatgtaaatgaactacggagcttgtccgggtctaacaaccttcctagattatctcaccgataccaagccgcgcagagaatagacacgatctcgatgacttgatctctcgcttggtcgaccgcccagcgtcggcctccctcagccacggcgtcgatggcctgtcgcggagaggaagtcggccaacctccgtgttgagcgcgagccaattaagcggggagaatacagatacatatgcagctccgtcgcgaccacaatcccagtccattgccgtccagacaacagatgagccttggatttcatctgcaacggaagccccgcagccccctgaacttgaacccgaatacaaatctacacccaaaccggaagttgtcacctatagcaaagctgtgcaaacagacggactagatctccagcccgagacccctgaagggtctgtcgcttcggatgatgaggagtcgcccgatactgcgcggtcgagcaagcgtctcagtcgacgagaccgggagcgggacgaggaaatccgacagaagcttcgcaaggaaattgaggaagagctccaagctaccagtcagaccgataataatgagaacacagctgcacagtcggcaaagctgcgatatccccttcgcaaactcgacgatgacgaactaaaggcagtcacatcatcgaacgatttcctagactttgtggagcgctcttcaaaggtcatcgagcgagctttggacgaagattacgatgtactggcagactatgagctgggtggaactgatgggcatctgcaagaagatgaggagactggcaagaaaaggagaggaatgcatgaagtgtgtcatttctgggacgaacgatggagcaagaaccgcattatcagtgacctaagcttctctccaaaggcaagtttctacttccaatacatgtgctttggctcatgctaaccttaacttcagttccctgaattgttgcttgcgtcatacaccaagaatacttctgctcctcacgaacccgatggccttgtccagatttggaatcagcacttacaaactcgtccggaatacgtgtttcactcgacatccgatatccttacggcaaaattttctccctaccatccaaaccttgttgttggaggctcctattcgggacaagtgcttgtatgggacactcgttcctcgcgcgccggtggaggctctccagtacaaaagacgccactatcgggcggcggacatgcccatcccgtttacagtatctcgattgttggcacacagaatgcacacaatatcatgaccgcctctacggacggtgtggtctgtggttggacgatggatatgctctcttacccacaagatcgtgtggaactgactacacctcccccatctaagaccgaggatctagctccaaccaccatgtcattcccccacactgatccaacgttctttatcgtcggtactgaagagggagtcatctacccatgccatcggtacgatcgggccggtgccaagtcgggcacagaccaccgtctagcctacaagggacatacggcaccaatcatgtctaccgcattccaccccggtcgtggacccgtagaccttggcgatcttatgctgagctccagtctggactggagtgtgaagctctggcgtgtgcggccacctgcgacgactgcatctgccacatccggcatggcccaatcgcaagtcgtctcgcccatactcgacattacccgtgacgatgttgtctacgatgcccgctggcacccaaccaaacctggtgtgttctctcttgtcgacggtgccggcaacgtcgaagtctgggacctcgcttcagataccgaagtgccagtcgcgcgtgaagttgttgacaatacccatggcaacatcatgtcccgaagcctcaacaaggttgcgtgggacgaacgtgaaggacgccgcctggcaactggtggcctcaatggtgtcgttacagtctttgaagttggcaagggtctgtgtggcctatcggaggaagtgccggcggacgaatggatgggtatgaagcggcttgtgggaaagctggaacagaaagataaggatcgagtggcttagagttaccactccaatggcttgtgtcttttccgatgattgtcgatgtagttttcttctgcgggccgaccttccccgtctacctttttccccgcgaggcccccttctttgccatatacccccttcccttcggtcacataatttgtgcatgtgtatgtatctcatcgccattgcaaacgtcatcatgttcctggatccttatcccctcttcatctccaactggacctttaccatgaagatcgtgaagactaataataataaaaaatatgtgaaaacaatctactggcagactcaagatcagacaccaccttgggggagacgttgctgccaagaatgtttccccgatgatactcagtacacagccaagtctgcagatttggtatcttaagctagtcaaaccttcgtcattgactatttctttactcttatacaaatatgatcacaacttattgtgcgtcttgaagatctcgaccgacaagatcgaaccaatagccttggaaggcaacgaataatacatgaaaaggctgtccatagttcccttctatccaggattcgtgaagacgtcagcgtatacatgtatgtgtctattcttgttcgatatcaaaagtttcaatccatccattggtggataatatcgatctgcaatgccgagatcggtgcgagattattcataattctaaaaaccttaaaacccccgaggcagaacccaaaagagaaagcaagccaatgtggaaccagaccagttcacgaccgtttgcctaaatcgggaggtaaccaagcttctggtaaacctaatctatcccatagctacctcatgtacatacgtatgggctacaatttccgcgtgaaccaaagcctgtcagcttcgatatttcacggacatgttcccgcaataggacatgtcatgatgtcacattatctggcttcgagggcccctttgagccatttgggagcgatctcgaggcgagatggaggatgagaaagggacgaatccacgggtagatttctggaagggctcttccaagatatgttccaaacccacagagtcggttcttgcgttccatggaagatctcaactctaaaataatagagtttcaacggccatgcgcctagtgttgatttgaaggaacaccactcttgctatgtgttctccattttaaacgtgttccaatggtcgactacggcccttgcctcatatgcatatatctccggtgggtgtatttcggggatttaagggttcgttgttgaagaattttcttatttaatataccatactgtccatttttcctcgcccggttatagaacatagaatttcctacagatgaagatttcaatttcccttccctcgttatcatgggtgccgactggaacccgggtggccaacaaccatataatggcaattccatagtgggagctactgccgccattgctgcggtgcaagttgtcttcgttgcagggaggttctatactcggtttatgcaacggatgaaaattggtatcgatgactatctgatcctacttgccctggtaagtcccgctcggagatagctatttgaatatagtcatactaatatctctgctatctaggctacaagtttggcagaatcagtgctctttattgtctgtaggtgcacggtctcagcacccatctcgaagaacaacgaaactcacatatcatgcagtggccaagatcggcgtagttgggtaccacttcgactacgtatatcggatgcctgataaagtggctctcacgagaaaggtacttaccccaatcctttgatctctgagaattgcactaacgacagcatctagtgtatccttgccttcgaagtcctcgattaccctctcaacatcaccatggccaaaatggccctattatgcttctatctacgcatttttacaacccgaaagttccagatcctcgtctacatagtgggctcacttgttctcgcggtgggagtcagcgttcttctggagaatttcctccaatgtcgaccattcgcgtacatgtggaatcgaagcatccccggcggatcgtgcatcgatccagtcgacgcttatcggattcttgcgccatttaatgtcctcactggtgtgttaatccttgttatgccaattccgactgtgtggaaattgcatacatctagaaaacagaaactggccttgacgggtgtttttctgttgggtggactgtgagtgattcaaactttgccatcatctgcgcttgaaataaatacatagtattgatgggacattagaggaaatgtggccagcatcttgagaatggtgatgtactttgccgaatcaggtctcgctaaggaggacccgacgtgtaagaaccaatcccggacttggatcgaaacgaggactgatctataacaaactagggttcgcggcgaaatttggtatcctaacggtcctcgagggaggtttgattatcatcgctgcttgcattatcagcatttggccccttttcactcaggtcatgccacggcgagtcatgccccggcgttttcacacaacattctctcgctccacctctcgcagaactcaacacctggcctggtatttgagaagaatacccacaaatagtgaaagccaggaaggcattgcgcgtcctaaagaggttagtttgcccaaaaaaaaatcttggagtagcttgccgtccttgctttcctcgccttcctcgttagcagatttggaggatcagagatggtcaatccttatggacgaggaggtgagtggctctcataaaacggttgcggggactcattaataaaaaaataatttctatctcttaagtgtataatgaatgagccaaaaatggaattttagaagccccccataagtgtaccttggcttgtcgtaaaccagaatttatctatatatcataacatttgaaaagctttgaaagcggtatctgtattcaatgaatacgggttttgccgagttttcgtatttgcatttggtcagtaagtgtatctgaagccagacttttggatttcattcgttagcaagatataatcggccggccattgatgaagcacactcactacaccctcaagaatctttaatcctcgcttttgctgtcgattgacaatgtaaaagtaaatcgtgaatgcgccgacgatggcaatgagaagaatgtgagacctggtaatgttgtcagccgaagtccaatgttcaataatttctgaaacttacccaattgacacccaaactgcggtctggtattgcggggcttcttgctggcggacaataaagctgcctgctacacccccgagtccgttacacgcagtgaccgccgccgcggtggccactcgtttccactggccgacgatattgttggcctggaaggcattgagggcagcccagttcgagatataagcaccggtcgccagaaaggtcccaatataacgcactgccacccgggtagatacgggaagaccgaacatcaggaacccagctatgaggacaagggcattgaagatgatcagcggcccacgcacgcggtagaaatctccgatcagtgatgtgagaataaccggaattatggcataatagtagggctaataaagaagttagagaatgcggcgtttatattctggatcaacttaccggtgtggagagcagaatggatttatttgagctgaaacccataccggactgtaagatgatgggtagaaaatacgacaaggcagtcgatatgagattgagcaagaagaacatgatcgcaaagccgtagattttcggatccttgaaattagcaagaagcgtgccccaggaaaacggttccgggataacatcagctcgatcatcctgaattcggcgcgttgcgaggcgcgcttcctggtctgaaagaaagcaaaagctgtgctgggcgttctcggggaagtcgaccatccaccagtaggtgataatacccaggacacaagtaatgagaccctgaacaacatacatccagcgccaacccgccaacccggccacgccattcagatgattgagaccaaaattgacaatattaccagtcgcaagaatcacaacttccccggactgcaagaatgcaaaccgaagctgctgctcttgtcgcggataccaggcgctaaccaggtaggtcagaccagggtaaataccggacatggcgataccgagcagcacacgcaggataatcatctgctgccagttgcgcacgaaagcagtgcatagcgtcaacagcccaaaggtgaatgtgattgtcgaaaaccagattcggggaccgacaaagcgaactgccactgtgcacggcagctgaaagatcacactggcaattgtgaaaataaatatggagacagagaaccggttgccctggcccagatcaagatcatccagcatcgtcgtcaccgatgctgaggacaaaatgcccgagtctagcaaattgagactgcataagagcccgccgatgctacacaggcggagatcgactttccatcgtacccgcttctctaaagcggcccactcgaccccgcgctctgcgttgagcctgttttgaccatcttcaggaggagcctggtcgaatatcacgccgtcggactgtgcattggtctcttgaaccactggatccaaggtatgcaggtcttgggccgttggtgtcaaagtgaacgagaattggcccttctctgaatcgaccatcttgactgagtgtctgaaggatcaggccaatcctcgatttccgtaatcagatatgtcgcaagttaagttgctaatccaatatttcttttgttttttcctccgacattccaggataagaacgtgatagaaaccggccgagtagtgcgtctcttagcgcgcaagtcggacctagtcccgaggtcggattatcaatccagatatttcggagtatttttctcatgatgtggcagtttatagggtgcaggcaagccagtctatgatcaatcacccaggctagtacggagtagacgcgtacatactttgaattcccacagagagcatgtgaccgggcacattccaaattggccctccgtgagatggcccctctttcccacaatatatattgcacgctgcacgggtaaattccgaaaagtcgcatacatggaggctttaacccatgattgaaacccccagtttacgcttattttacctgtgattacaatctaccgatgaatcgtgtccgtcacgaatcaaacgaccgatgcttcggttgcagcagaaaatgcgtttcttaaggaagaaaacatccgacttcaccgactcctcgatgctacaatactatctcaaaggaaatacaggaggatgttactgaatccataatcaacctctggtccgaaacctgtttgatcaacagggcccagattagaaatgccccgaggtcataggcgacaacttaaaagccacaagggatcgcatatatacgtcaaggagatcaatcgaaagttcgagggagcagacgaagaggcaaagaagcaaatgggtaatatgagaaaggatatggaggcctgaaggaagaacaagtgtgtcccgaatgtctataaagatatcaaaagcgggtatggagagttcgagaaaagatatggaaggttggaagcagcgtatggagacctgggtgaatgatatggacgtctcgaagctcgggggtttggactggaatggaggctatggagaaggaatttgatttaatcgacagagatatttctggcagcgaagctcgtgcttaagggccagagcaagataatattgtgcggcactaggggaggttacattgtccattttgacaaaggcacgctaattgattttctatctattattactccgtactatcgcagtactgaaaggattccaaattggccggctgattctactccgaatgtgccccgggctgacagcttacatacaggatgtggaatggaatgtggaacttccgtggaagcgtgagtttcttcaatgagattatcatgttcaggatgcctatgttataggcgttcttctataagatccgaaagaaccaatgggaacaagaagatttaagttagagctgcagttagcgtaccgattaggctaaaataggaaaacccaaaccaactaaagacaacatgcatctgtaggtacacatcaaaataaaataataagccaggtacaacggaaattgagccatcaacccgattgaaccacgggacgctgtaagctttgcgggcccggtgattgctctgtttgttgccccacgttcggtcgaatggagcccggggagcttgcaaaatattgccttggacttcccccacactttcgatttcctctctctccgcatttcataactaaactacacacccattatggtcgaactcatcaacccgcccgagactcgcgaactactccctcccctcctcgcatgcctccccctggcctttgtctcaccccgcgcacccccagctctgttaccacttctctcccctatcctgcgccaacgagtcggggttctcagttcgctatccacatcttccaccgagtcatggctgcaacttctgtgctgggaggctgggaaagcagagcgtctgcagagggtcattgacggtgccaccttcgaaccacaccccgtatcgggcgaaatcgagcttccggatgaacttccggtcacatacaaacggatcgacgatgagactctcaaagcacaagttccgctcgccgaatacagcttgacggtggtctatttgtggtgcccgacagacgaggagggaggtggtcgtggctggcgagtcgcagagcttttgccgcgggagggagctgccgaggatgacgataaatgggcttcttctatctgggaagcaaacgttcaggcaaaggaccagctcctgactgatatattaaaggctgccgaggaagagaaatccccggagaacagcatggagaacgacgacgacgacgacgatgactactgggctcagtacgactccacacccggagccaagacacccgcaccgcctgctgcttcatcaaagccgggtccatctcacttgtctgagcagtcatatttctcgcagtatggcgacgtgcagccagccatggataatcatgatcccacggaggagcaacccgaggttggtccatcatcgctcaacggagatatgctggccaatctcttgcgacgacaggtgaacggagtcaattcagatgacgagccccgcaagaacggatatgccccagaccatatccccagtgataaggctgcgcaagatttgaaccacccacggccggcctctgcatcttccggtagctctgatgctatcgctaagctggaacacgaggcagagagccggtccacctgcgaggtcggagtgaaacaacatatcggtacgagcatcaagagtttgttccgtttggcaaaggtcactggaatgtcccggggggagttccaggcattggtttcgatggaattggagcttttggatattacggatgacgattaaggctaaaatacttgagtgatacccatgaatcataattttgcatatgttggccataaacatcattgggagtgaatggtttgctttgggcatctgatattgttttaaatacataaaccacaatgaacaactccacactaccttaaatcctgcacaggtgacgccatctcgcattgcatgcccgattaggcgtagcgcatcccaaaaaccaaccttcgagagaccatggatgctgcctaaatcgatgtacatcgtatcgttctaaccaattcaagcaattggaataaaccttggaaatgtcttaggctgagctcaccccgccctcaaacttaaataagagttggcccccataagacgtttacgagaagaaccagcttatttctctttcactcatacacaatgcacgatcaaaagaaccagaatccatccgaggacagaggacgctatcatgaggaagaggcagcagatcagcctccagcatacatagcaggacccgcaatacaaccaagccgatcaccagcacaagcccctcatcaaacaagccacaaaccaatcgcaatcccagccatcacctcgtcctctgattctcctttcatccgtgcatatgcacccattctaagaaaccaccaacttcccaaggaatcgtttctcagcttcctcgaccaactgaacaaagacatagctgccagtccgcccctccaagtcctagatgcaacgggcgggatcttgaagtcggtcccgatattattcccgttgcactggattggcggtgtggtcagcggactcgcaaacatgggcagccaaggcatgtccaaaagccgaacggactcctccatcaaacaagcgaatagggacatattccgtccgcgcggcttggaggttgaaattgcgaaactggatgccctggcacatgtcgcaaagctccctatattggattctcaaggcaaaatcgatcgacaggcgcctctgtttctacaactccaggatggggtgtccatggcgaaccctgggaccgatgaaaggcagcaacaggaacttgatttgcagcagaggatatcgactttgcagccctggattgctgagcttgaatttgatatcttaccttggtcttccaagtctagattgacccggttcaacgcctcgttgaagaagtataatgagccggaatatcaggagaagagaggcatgggtaggcgaggcgatgtttacatccaagagacaccacaggaagaggctccttttaggaaggctttgtggcttgttattcgggaggttgagacggatgaaagacgttaatatgtgaatatatatatatgtgcagttcaccgtctatattagacttggctgaacttgacaaggggcaaacaggaagattctttgtcaactagcaatagtaattttaacgagaataccagaactttaatgcatatatatctgtccaattagatgccagaccaaccaacgaaaaggtggtcaaaggaaatatcacatgtagccattgcgtcgtcatgaaaagactgatagcacaccacacttgtaactcccaagggtcaatttcttgtatgtaacctgtactcgactctcaaacaaggagttggtgctcaaagtacactttttgtggatttgtatacgtagatcccgcctggggccaccgccctgccccgaaactaaccttggaagaagacacgcaacgttctactgtcatccccctctacatctcctttcctttctcatagtttacttggcctcaattgttgggtgccatgcttatttggtgattctagtaagcttccttttcctctctattacaatttttttctgctttgttgatgtttactgacaactaccgaagtctatttggctataggtagtttctcggtcgctctctacatttcatattttcaacatgtcgtccccttcgccctctctgcggaagagaggcggaaaaaaggatgtttacaccgcattgccctctgaggatggcccggcccccgtgtcggtgccggtcaaacagaagtcggaatgggactattggctggccatagtgattcttaccctcctggcttttgcgacacggttctaccgcctcgatttccctaacgaggttgtctttgatgaggttcacttcggcaaggtatgaagtcgaataccttttgtagcggcacaatttatgaaaaagggggccctttgactgacattgaaattactcggccagttcgcttcttattaccttcaacgtacctatttcttcgatgtgcacccgccttttggaaagctgttgtttgcccttatgggttggcttgtgggctttgatggaagattcctgttcgagaacatcggcgactcttacatcgacaataatgtgccctacctctccctccgtgccatgccggctactctcggcgccttgacaattccggtggtgttcctcatcatgtgggagtctggatactctctgccagcctgtgtgctggctgccggtctgatggtgtttgacaacgctcacgttggagaggaccgcctgatccttttggactcgaccctcgtgctgtcgatggcgctcagtattttgtgctacgtccgtttctacaaattgcgtcaccaacctttcagccggaagtggtggaaatggcttctcctgaccggcttctgcatgagctgtgtcatctctaccaaatacgttggtttcttcactttcgtgaccatcggcgccgcagttctcgttgacttgtggaacctcttggatatcaaccgcgagcagggagcactgagcatgatcagctggggcaagcatttcatggctcgcgctgttggattggtcattattcctttcatgttctacttgttttggttccaggttcacttcgctattctcaaccggtccggccccggcgacgacttcatgacacccgagttccaggagactcttagtgacaatcagatgaccgctcagtccgtcggaatccaatacttcgacaccattactatgcgccacaaggacactaaggtcttcctccacagtcactgggacaagtaccccctgcgttacgacgatggccgtatctctagccagggccagcaggtcaccggttatccccacaacgacaccaacaaccagtggcagattctgccggccgatcctctgattgatccatccgagtccaagagcgtgcgcaacggcgacatcatccagctccgccacgttggaaccgagagttatctcttgactcacgatgttgcgtctccattattccccaccaaccaggagttcactacagtctctcaggaactggctgagggcgagcgccacaacgataccctgttcgagctcaagatcgagtcaggcaaggctgcccaggagttccgtactcttgccagcctgttcaaattgatccacgttccaactcgggttgctttgtggacacacacaactcccctgccagaatggggttacaagcaggccgaaattaacggtaacaagaatatcctccaatccagcaacgcgtggtacgttgagaacattgagaacttggaagaggatagtcctcgtcttgttaaggaggagcgtaaggtcaagacactgcctttcttacgcaagtactttgagctgcagggtgccatgttccaccacaacaacgctctgaccagcagccacccctatgccaccgagcccttccagtggccgttcctgttgcgaggcgtgagcttctggactaagaacgatacccgtgagcagatttacttcttgggtaaccccattggatggtggattgctagcagtattctggccgtgtttgccggcattgttggtgctgaccagctctcgcttcgccgtggtgttgatgcattggaagaaagtgagtcgaaaaaccaaacatcctgctcttatccctttttttggttctggcaattaacacacgttcattagtttggggtcccggtacgcgctcgcgtctgtacaacagcaccgggtttttgttcctgtgctgggctgcgcactacttccccttctggctgatgggtcgccaacgcttcctacatcactacctgccctcccacctggcctccacaatggtttgtggcgcactggttgaattcattttcaacctgcagccgctcgatccccgaactgcacttcctcctgtcgatgatccctcgggcaagtccaaggcacggtcggtcagcagcctgcgtcggttcatcacggccaaggaacgcatgggctgcaagtcgctcatcgcgggctggattgccactctcatcattctggctgccaccatctggggcttcatcttctatgcgcccttgacctacggtacccccggcctcgatgtggccggtgtcaatgcgcgcaagtggctcaactacgacctgcactttgccaaataagctcgtcgctgggccaaggaggcccaatccgcgagacaatacccattcgagacgatgggccgaactgaaatttcaaattcacaatttttgtaagataacttataatccgtgataaaaggcgggtagagagaatgtgtttttttttttttttttgcgcgatgggaggattgatatcagtcgttggtatcatttgaaaccatggtgtatgtgcatgtatgtgtggccatttgagtcctctttttctccatcttgatgtagtacatattcaatgtcccatgttcagaatttctcagtcgagtcctgtgtcacaattggtggcacgggattatcagccgaccgtgcaaactagtctgcgatcgttgatccagccttgttatattagggttcgagatatagataggtacggagtacgcggagtagataggagtcgatgcaagaagaatgtgccaatgtcgatcgagatcgacttcacgtgatcgacgatcggtgacatgtgcgcatcgcattggagcagatgagatttcatcgttggatactccgtccttgacgagctggcctgacgacgttgttctttttattcaaaaggttatatgaatgtcttatgtatcttgcagatgcctaggcctaacccttttctcttcccacattccaattcatttgcctttttataaattggggttatttttagaccgcgaaaaaaaaacagcccactgtttatgtacaaagggacctcctactcgctatgtatagcaaacggtttcacattgtcctatgagatcatgacagtagccgagttttaggatcctaaataataacccacgatagtaatatagtaatctagtaatacgccataataccaacggagtcgaatgtcaataatagtcctaatacggaatcctcctcagcccatatctggacactacggataccaaagggactaggctgtcagtagcgtcttgtcttttttgcctcgctttctacgcattctctctctcttttctttcttttctttttcattctttactccctagtggtttcttagggtctctccactccccgcgtctccagatctcattggtgttttctttgagcgagctgaaacggacatttcttcgtctcacccgatacttatggtgggttcggattctttccagaaaaaaaaaagagcacatattcaaggcccgcaaggaatttgggagtaattattcaattcgttgtgagatgctatcggatcggacagacacaagacaacccactctgtggattcctgccgggcctttgatcggccgctagaacaaacccatgttgtgcttcgtctctccctgaaagcttctgactgacttcaattcttctccagcttatcccctaagctcagcttgcctttgttttccctcggtcaatcgttatacctatctatcggactgatcgcttcttcgggtatcacttggattcgacacatcaccctcaaagggcgacacacccccccaggatagtccaaagcttgatgagatagctgactcggaaaggcgcactggccggttcttcaattatcagcccgatctttcagaacagttgcttccatccctatgaaactgcccaagagctttaccaggcggaaatcgtccggcaacgttctagaggaggtggaatctcctcaccaatcctcctttcgagtctttgagcgcccggggcctcatcgatccatgacggatggagcagccctgaccaagccgctgagtgagggcaacacggtgccgatgacggaggattctgataacatctttgcggagagggagcgacccctggacaagagccggtacgatcgtccctcgaccatggattctctcaggagacggctgactgggaaccgtgatagtggtaattacgaaagctctacgtcaactaggctaagctcatcatccaccctcccatcgtccaccgaggtcccgccgcccgaggagaccttatccccgcattccagaatccatgatgttccagctcccccacccctcacgagtgcgctgcgtgccgcaggacggaccttctcgttcggtggtcgattcagcaggtcaggaccacaagtgcctcggcaacaaacaccagatgccgcgaagaatcgcccggtgacgggcagcaccgacagcacggccactccacccaagctgcccgatacagacttcgctctcggctcgcaggatgacttcaacaagatgtttgataacctgggtgctcgagagggttcggcaatacgggggtcatcccctaatccgggcaaggtaagagctgcaatcgctcgtccaggaaaggatgcagtgctgacagaatcgcagtattcctcgtctcccccgagtcatgttctgtccgggtttcaaaacagcagagctgccgcacccgctgcgattaatacagaccgatcgactactattgagtcacccccttactcctgggatcgtcgcccatccgaggagggcctgctacgtggcccgcgttctccgccgctgaatcagagccagtctaccctcgatacagttgttggtttccggaagttttcgccgtctcccaatcagtttgccgaggctactacttcacatcgttccttagagcgcccccagggatcggaaaggagaggactgcggaggagtgggatatattcggccaaggaagaatccggatctttcgacgacgaagatgccaaaatggttcgacagtctgtcttgttcagcaaagaaagcacgccaccttgggctgagggtagcccctccggtggaaccccattgatcgataagggcaaagcacctaattactctggccaagtgaacccagaacccgataatatgttccaataccgccgttcgcccgctccggccgagagattggacccctccattgcggatcatgcacggttggctgtgcagtatgcggatagtctccccaagtcatcctcgccgggtaacaaggtgatgactccatctcagttcgagcactatcgccagcaacaggaacttcgacgttctaatagcaatgcgactaagagcgatgatgagtccgaccatgacgactttgacgacgaacaagatgaggtggagaagcaacgggagacggaacgccaacgacgaaggcaggaggctcatctctctgtgtatcgtcagcagatgatgaagatcaccggccagcaagcacccgtgcaatcgctacgcccggtgatgagtggagctagcaacagcacgcccaacttgctccccagtcgcctgtctgcactaggcgagaagtccaccagtgggaagagcagcgaggaagaggatgacgatgtgccgcttggtattctggccgcacacggtttccctggtcaaaaccgcccgccaacccgcctgaacaacgtcagctccaaccccaaccttcgtgcatccatgcaaccgccatatatatcatcttccaactctgtttcaggtgccgatccgaacggcagccgaggcagtctgccaccttttgcaaggaacttgccacgagatccttacttcggtgcaggtttggttaacaacgccaaccgtgaatcgttggcgttcggaggtggttcggtatatgggggatcgtcgtcccccgcacctccccctggaggtcttgtcggtgttatagcaaatgaggagcgggcacgggccttgcgcagaggaagcccgaatacacaagcaatgcatgaaatgggaggggtgcctcggccatactcgacaatgccgccgccgcagcagcaaaacgttaccgccggggaacaagcttctatccagctgtcgcagcagatggccaacatgatgcagatgcaaatgcagtggatgcagcaagtgatgcaaatgcaaggtgggcaaggtcaacctatgatgcaaggcatgcctcctatgatgatgcctggcggagcaatgtccatgcctcccatgggccctccttctatatcgggaccccagtccatggctggcaatccgaacttccggccgatgtccatgcccgcaacatcctttctcaatatgccgccctcgcttccaccccaagtcgatcagcgcacgatgagcatgctggaccccaacgtttcagcccgtaggaccggctcgcctatgccgaatctgtccggcaattccttccggcccaacaccggatatgcggcttcaatcgctccgtcggagcgcagtaccgcgggcatggcgcctcgttaccggccagtatcagtcatgcagcccgaatctaattacgcggtggcatccccaacaaacaaacctttcggtgacgaaaaccacaacccgtccatgccgatgcctcagtctcacattccgaaatcgcatctcgcaactgtaaccgtccgccctgtttcacgggaaaatcaaaagcccggttctgaggacgaagatgacgatgacgaggcctgggctgacatggcgaagaaacgtgaaaaaaagaagagcagctggaagatgaagcgagggacatcctcgttcggggatctgctgagcgccgtgcactgagtccctgattccgtttcctctctttctttctttattcctcaactcgaccacgaaagcgtgcttgcattgcatttgaaaagaactccgtctgtgctacgctgtataaactgtccctttattctctgcatctccatgcccgcttccgtttcctaatatcctccgcttcctctacaacatgacatatgacgcacataccatcaactcagagaagggcttgccgtgccatttggatatgccggctcgataatgcatccccagccctcacctcacatcttgtttgtcactcctcgctcccgggcccgggtttccttgtatcatcttgtcatggtcattccggtctgggcagagagatttggcatttacaagtatgaatacatatgctttccttgtgcttttactctagtttcgatttttgagctcggtcttctgcgttcctttctcgctttctcatgatatcggcacgggaagagacatggcgttatttatctgataggtttctatctttgtgctttctcatcttgtattctgtctgttttgcattgtctattcgccagagcgacttccttaatatatttcaggtcttgtggccattatctcggctctttccaaggttcctttttccttctttctttcttctgtttaggttttgtgttttctacctcaatggagatgtatatctaacgatagcgtagatctgggtcgagataaggaagggatctccatacactaggtagttacggctaatatatgttatgttatctcatatcaagatgatcgattgcgtgcgtatagcttagaagttacgtcgtgtgaatggtgtccaagcatgaatttggcttggtttagtaggctacatgtctcggaatcccgaggcttattaaaattcattggaaaaatcgtggaagaacatagggtttgaaggaactaacactagtgtatcttgaagtgagatgaagataaagtcaatatgtatacagtcatgtgacatcatataagagagcggtcacatgatccatatcgatatcgatatcgaccacgatatcttcatcactcaacgtcaaaatttgagcaagcagacagcagggcctgaaaaaacggtttaaagtatagatctccattgagatcctttgtcgggattttttcgctattgataagcaccctcaatagcgtattccgaagtcacacgccattgatcgctattgtcttgtgattccctattgtcttcagaggtcaatacggaactacttctcgtctataattaagccttgaaactacacccagccttcaacctctcaccaatctctctcttctgaaactgcacaaattcttcgatacatacataaaatcatatcatccataccgatataggtatcttccaaggttgccctcaaaccctccggctttttaaaaacagctttctcgccacaatgaatgctccagatcggtgagtgcagattctcttttgcaatccccaaagtcttgttcatttccagctgctctggtgaatttggttgttggatgtcatatgtactacagagcatatttcctagattctgggttaaattgtgccttccttttttcatatcttgtcaatcagggaaggagctatggacatggatagccaggatggcactttcctcgcaccgctcttgccctggcaatcatttcatcttgcctatttataccgtctcctcggtcaacacatcttccctctttcatcctcttgtttacccgtggactgtgatcctgttttacactgtcgccctcttttttactgtgtatccctgtttcatcgttctgttttgtgcagccatgcagggccctggatttatcacggccactgcggctatcgccagagagtgtgctggtcgccgtggtcgcggtcgccactcgcgtcaccctcgccctcagaaccccagcgatgcccctgatgtgtcagtgtcattagctctcggattaaggcctttgcttcattctgattttgaccttcttctgcattctcatcttgctttttcatctgtggaccataaactgaccaagctcatgaatatagttatgaagccatcctgctcgctcctggcgaaagcaagattgatgttgaggtcgacacccgtaagtcatgctggtcagtgtacacgacacaacctcactaaccatctctctctaggcctcccttctgctgccatattcaccttccgcaaggaagaccacacccttggcaacatgctgcgtcaccgtctcctcaagactgcccatgtgatctttgctgcctaccgcgtaagcaacctgctctatgtgcatggtgtttcttcttggaagatactaacaacaatccattaggtccctcacccgctcacccccgagttccagctgcgtatccagactgatggtgaggtcactcctcgtcaggctgtcattaacgcctccgaggctctgatcaaggacctgggcatcctgtctcgagagttcaccaaggagttcgagcttcgcaaggctgccaacgccgccaatcagcaacagcagcaaagcaccgctgagtaaatggttatgagtgacacccagctatcatccatcttgttttaactggtctgaaaatctggcgcatggagcagtcatggtgttttatgccttgcgtttgctttcttttcgttttcaatctttaagggtggctcctttttgcgcgggcatgtttctttttttcaataccatcagctatttgctacccacaaatctacaaatttacaagcttgaagctctaatcatcacttgtatccatcaaccaattattccagttgtagatccaaaaatatctcgaatgactaagcaccagatgaggttagcgtaggtgcctccgcgtccagcagcggcgtcattcgcatcctcctgagactcaactcacttagaattttgcattcgtcaatttcttttggcttttctgcatctatttggctcatgcgagcgtggtgtctgtgatgttttcctcgtcgaataatttcctcgggggtggtgccagtggcggccaggcaccattcatgcaacagcaacaacaacccccctattcacaattccctcaaggccagatgtcgccatcagtccaaccccaaccgactggatttcctctgcagcctactggtctcgctccacagccgaccggattcgccggccagccctccccgttcggtaactcgcagctacagcctcaagccaccggattccccgcaggacagctccagccgcaattcactggctttcccggcgccgcgccccagcaacctcagcagcagcaagcgcaaagcttccaaacacaatacactggataccctccccagaaccaagcgcagcagccgcctccggtgccgcagataccaactcgattcaagacctccagcgatatcgcgaactccttccaagatgccgctggctctggggcgccccctcaggtgccgccaaagacaggatcaaagatcccaaacattcggctttcttttatcacggcacaggaccaggcgaggttcgagcagctctttaagtctgcggttggcgatagcaagacaatggatggtttgtccccgcgcactcaatatatgatatggcttgtatacagtactgactggtcacaataggcgacaaagcaagagatctattgttacggtccaagttgacaggcggtgatctttctaagatctgggttttgtctgatacgaccaaatctggacagttgttcttccccgaatttgcattggccatgtacctctgtaatattcgtatcaccggccgcgagctcccttcttccctacccgagacggtcaagaatgaggtttctagtatggttgacatcatctcgttcgatgtccccgacacacagccggcggtccaacagcggacaaacgtccccaactttgatgcacctctcatggagaacaagtcgacgcccccaattgttcagcaacctgtcccgcaacaacccaacaacgcccagctcctatcgcagctgacagcacagcctactggattctttccccagcagacgggtatacagcaggctaacccgactggcttccctggccagaatcagcctcaattccttcagcctcaacaaaccggtttcatgacgaatccacaggccacgggatatactggccctcggcctccgatgccgccaatgcctactggttacggctcgaacctcagccctgctcagaccggtgggatgcaaggcctgggtgtgcagcctacgggtctggtaccgcaacctacgggtataccaggtcaatggggattcatcaacacaccatcgcaaggtttgcccaatatcgaggctatgaagcagcaactcatgccgcagcctgggcgtgagggtggtttcagtgctgttggtctttcgggaaatgctacagttgcctgggcaattacgaaggaggagaagaagatttacgatgatcttttccgtgcatgggacggtttccgcaagggtttcatcagtggcgagactgccatcgagatcatgggccaaagtggtctgaatagaaaagatctggaacggatctggaccctggctgatccccacaaccgcgggcggctgaacatggatgagttcgccgtggctatgcacatgatctaccgtgctctgaacggatacccagttcctagccgtctaccacccgagcttgttcctccttctacaagacacttgaatgactctatcggtacagtcaagtatctcctatcccaggatgctgaaaaccgcaaggctacaggcgcgttcctgcagccacagaagaccggtgtcagctatcttaaagatcattccttccgtggtggtgcagcaggctcttctggggccagtcgcaaggatgcgacggttttcaagaataatgactccgctggtggataccgctctagtgcacgccgtcgcgtggctaacgaggctcgtaccccgtcaccggctgcatctggcgcatccgaggaggagtactctgtggaacagctgaaaaagaagatccacgaggccaaggtcatgattgatgctgccgacttccaggatgagaaccgagccgaggatgatgacgctctagaccgccaggatcgccgcgaggcagagagtctcatggaccgtatccgtcgtgtacaggacgatctcgatactcaccccaacgcctcattccgtcaagtggacagcggagcagatcgaagggctcttcgtcgccagctacagtcttttgaagatcaagttcctcaggttgcatctgatgtgcgtcgtctcgagcgtgaaatcgcggacgcgaggcttgagctcttccgtctcaaggacgccaaggcacaccccggtggtgcttctaatatcattggtactggccctggtggcactgtgactgaggcagatcgcatcaaggctcgcgcgcgtgcgcgtatgcaagcgcgggctgccgagctttctgggcgtcccgcacccgcaacggaagatgacgatggccaagcggctcgtcgtttagagtccgagagcaataccgtgaagatggagcgggagcgcaacgacactatgactcgtgatgtcgaagaaagtgttcgtgatttcgctcgcagtttggaggacagtcttcgggacgagggccaaaactccacacgtgagcatgagaagcgtcgttgggaagatgcattgggagttgaagacgtcatccgcgacttcatctatgacctgagccgcaatgcgcgaacagcaaatgttcgcaaagaagagtatgttattcttatcagtcaggaaaagtattcaacgctgacagattatagacgagagagaccttccccagatgcgcattctcgagcatccccagcggccgaatctgctgctgcgcgcccttcgatgcccacatccgtgcactcgtcaagctctcttcctggtaacacacatgaagatcgtgtcgcggctgctcgggagcgtgcacagaagcgcattgctgagcgcatggcagctgctggtctgaagccaaatgactccactgagactcttgcgcaacgccaggagcgtgagaagaaggagcgcgaagatcgtgtcagacgcgccgaggaagaggatgctaaacgggaagaggagagacagcgtcgcttggccgaggaacgaggtgttcctagtgatgcagccccgaaggctgcgggcaagaaacccccaccggcgccgcccacccgcagggctcggacggatagtgccggccaagccgatgctaagaaggcagaggaatccgctaaaatggagcaggctgcccgcgagcaggccattaaggaagaacaagaggtgcaggaagccgagactaagcgtctagagtgagtaatctacagccggtagagacaaaatgagcggttttggctaatacatttacaggagtgaggcaagccaaggggagttggatttccaacgcgagaaggatgctcaggctgctcgacttcgtgctctcgaggaacaagtccgccaaggcaagattaagaagcaggaagagaagcgccgccgggaagaggctagccgacaggccaaagagcaggaagccattcttgcagcccagcgcgttgaactggaggcggccaaggaacgtgagctacagctgcagcgcgaactcgagggacttgacgagtcatcgtccgatgacgaaggccctgccgatattacgcctcagtacagcaccccgacgcagagccagaccctccctaccccgcctcctgtgcccacaatagctattcctgagcctcctgcccccgcgatagctattcctgagcctcctgtccccacgatagctattcctgaaccacctgtccccgaaagcgtgcctagcgagattggctcccccgaaagcagccgtggtgttcctgggctcacgcccgacgctgagtccaaaaacccgtatttcaagaacaagagccaaccatccgaccccatccaagcgacctcgccacctgccacagctcagtctacgaatcccttccaccgcttcgtccagcaagaacctatcaagcccaccttcactggcgcagcccccctggaacgtaagactcgtgctcgcccggaggaagacgacgactggtccgctgcgggctctgacttcgattcatctgatgatgaggatgaccgcccaaccggcggcagcgccaaacaacttgctagcatcctgttcggcactatggcacccccacgtcctctgagtgccatggacgacgacaaatctgcctcgaaatctgctaccccggtacaagaaagtccaattgcacctccgcccccacccccagcaactctgcctcctcttcctgctatcccaagccctggcgatgccgtatccccatcacccgcgccatctgcaggagctccacctccacctccacctccgcctcctcccccaggagctggtgctccttctatggccccgcccccgcctcctggcggagccccctctgctcccccgccaccaccgccagctggcatcccacctccacctgctccccccccccccgccgnnnnnnnnnnnnnnnnnnnnnnnnnnnnnnnnnnnnnnnnnnnnnnnnnnnnnnnnnnnnnnnnnnnnnnnnnnnnnnnnnnnnnnnnnnnnnnnnnnnnnnnnnnnnnnnnnnnnnnnnnnnnnnnnnnnnnnnnnnnnnnnnnnnnnnnnnnnnnnnnnnnnnnntgcccccccggccgcggccggtggcgctggagctggccgaggcgccctccttgcgtctatccagcaaggcaggaccctaaagaagactcaagtgaatgatcgtagcacaagctcgtcggcaggacgcgtgctgtgaagagggaattggaaagtctttatttttattttgagagtacatactgtacagtggcgaggggaaagacatggccgtacctacatgattggggagtaaggtgacgaggtctatggataatggtagtgtagtaagcgagtagttagctgcgtttttgtactcttcttggaatactcatcgattttgtttattatcatcatttggcctaacattggaagcaatctgtctataagcgccgcaaatcgcgttcattctaggggttgttcacccgaatccttcaacatatccgactgattaagtactccaaagatagtcccggaggtactctagtctatctagccttctgttttggattttcctttcctagttgttgggatttatgtatagggaagttgttccttgtcgactgcctcaacatctctaccctctatatcactatcatattcaaatacatttcattcgcttgtattgatttagaaccccggcaccgatactctaagatagaggccgtacactctgctggttatggaaaacatcatccgggtttaccgcagccttgacttgacctatagcaccggccactaagccatgtagactcaatacatagacctcgatgaatcttacatttagaaatggcaaacacgccaagattggccaattgaagcatattataattccatattcattactttctttccacgggtcttcgaaatttgataacgacccccattgttaattaacatgtatctatcaaagtgaactaggtcactttttaatcatctcgtttcccctgctttcgtaatcgtaaatcggagtagcgaaacggaggcataggcgcatatgtagacttcattgaatctggaaattcattgggactgctgtggcttatggaagagcccccttcatgaatctccctgtttccatcgccgtagtcatgaaacacaagtatctcttgcacattttcttctccaaccggtgcatctgcttctgaattggagccaggttgtgatggcccagaaatatctgttcgtgtccttgacagaggtgacacaaaagtctttctcgattttatggaagacttcttttctgatgatggggtggatgtgcgagctgaagagtccagaatgtcttcatttatcaaactctgagcctcagaaagggggttttgcttgatctgatttatggtgacgaccatcgattttgtattcacgaccaactttggctgagtgctggtaccggagaattcactcattctctcagacaatcgtcgcagacatctctcttgacgatttatcacccgcctgagctgtttcctagagtagaattagactatatcactctgtattcgttgcgaaaacatgggtctcacatttgcatcttgagagatttcatttcgctttttgagacagatggtttcttcatttctctcaaacggaaatcgagaatgagcagacagttaagcgctgttagcgtcattttgaaactggccagcgtgataaggggaagctggacctcatccttcatccagtgccaccgaagctttgcgataagctgttcaaatcgactagcattgctttgttttcttaaaggcccaagcttcagaaaaatttcaccgatttgtccaaaagcgaaagtggcttgggaattgagagtctcttccagcttttgctggcgagcgagtttcatgaccctgttgtccagagggccactaatatggctgaatatcccaaacaggctcttgcaagcggatacctcatctgcgagaagattgacctcttgcttggcgaattggaaggtatgcttgaggcggtgcaatcgtttaccacatttctctagctggttatagatcgcgaatattgatgataccgctccaatggcttccattgcgaatattgccttccttcagtcagcacacaaagccattattatactttaaatacctaagctgaggggtaatgaggctcaacgctgatgacagaagaaccgtgagaggattcagtgagcctatcagagtaaaacacgacgttcctacatatatagtgccgtagtttgcatcacatcatgtctgtgcgcatatattggttgtgcatactacgagtagattatcactctccaatcaatcagcttattcacattgattaagagtccttagggctcgaaaccaaggtctaactgtgactctgtgttagagagaaccgctacgtaccaactcaaacccattgaatgggagcggctctccatgaacgcgaagttgaaagctgcgcattatacgctaatgtgaatatgattacagttcgtaacatgtttgtttgtttgttttcttgggagagggagggggatagtgagactcgatgctgcgttagtagaggagccaacgataagagggcccgaggagcctatcaaagtacaacacgatgttcctacatgcatagtgccgcagcttggatcacaccatgcccatgcccaacgaacggagccgctgcataacaccaaccaagcaaggtgtttacggtagctgtgccacgccaaggggtaatcgttgttcaagctgtaagttctatttgaactaatcattttcaccaaagactgcgagcagtgatcacgaaagagggcagcatgagataaaaaaaaacaatcaagtccgtatgttcagcagtgtccctggacatttgagaccctcgcagccaggatcacgggtaagccttgccctagtttgaatggcagtgggtgtggtttgatggtggagggtctttgggagttccttccaatgaccctttcaaagattttgattttgaccttgacaatttcatattcgggcccgaggacttcggagaagggctggcttagtggagaagttatctggtaagactggcgggacaccctcttgccctacgtgatgtggtctgaaataaattgtgactacctgctacggcagtcttcaaccaactcattttgcccgcagtaaaatacacaatacatacaactatacacactagtatcaggtatagtcgattggcagggtctgtgcatgtagccattggccaatgaccatgcttgcgttgtttgagaagtttgcaagacgtctcgcctcgatcttcagctcccccgcaatgtccccagatccacctgggttttttgacccacgctgctgacatgcacacttgtgacgtccattacaactgcgcctaaggagctatcggtatagcttttgagaacgagattgaggagctggttggcgaaagtcaccaaccgaaagctacagggaaatgatacggacacactattgtctacaaaataggcagctacccctctctagcatcattcaccaatatgttcgccctatcgcccaatcaccacggtctagcaggcattcctaactacctactaatatctgccaaactgcattcattctgcgctttattcttggcttggacagaagctatcgtcttcgccctttttcatctgctcgaacgccggtattcttcaatatgagtatcgaaaaccaggaatactcagttgatcaagagattatttctttctttcaaaagacttccaccgaccgctcgtcctgtgatgatcgagcacggacacttgtcggaggcactgtgacccccgttgcagtgcaaggcgcttgcagttattctgtatatgcaggtctagagtatgtggttcagttccgactaaggtctcttgggctgaagacagaaattacaaatattgcccgcaatgtatatgggaccctagtgccctccgtctcttatcacggtcagattgggagagatgatgtcagtgggaaggaatctctctttgtctatgtgatgagtcgggtggaaggcattagccatctcgattttatccttgcgcataacctcccagagaattcgccagagtactttacctggagagagaatctggtcttcgacattgctaggtatgtttagagtgagtgggctatattattgataatgatctaacccgaaaggttctttgctctcacatggaaaaacccgcagaatgtcgaccgatccttttgtgaaaacctcgatcaaagatatgacgaagacctacggcggctcttagctgctctacctgatcgcttccacccaatcatccaacaatcgattgacgctctacctgctatattttcgctgtctatggtccttcttcgcatggattttggtaatgtgcaatatcatggttgataccgacaataaccatctggtcggaattatcgactgggccgaagcagagattggtcccttcggaacgaacctccattctctccagcagttcatgagcaaatatcgccttggtgttggctggattcgatatggtagctatgacactttgaacaacttttggaatatcctttccgcagacactcggggtctcgagaaggagacaatccgaacaataaaatctgcaatgattgtgggccttttgctttcccatggatttacaagccgccttgccaacatgccgaagcctgagcccatccgcgacgacaaaagcggagcttacaaaatgcttggtttggatggtttacttatcgttcctgctacgagtattgtgaattagaggtttttagtgacaagcggccatatgttgggatttgaaatgaacgagtgaataagctatctagtagtgagccaacccgtaagtcatggagaatatctgtacatactatgtattgggttagattgagtgatacttatcagggtgttcccgtctggagccatggaagtggagatgagtaccccaactaggcacggagttggaaggagtacggagtgtaagctgtttggttggcttggcataactactggccagagcaattctcagtgggggaagttgtgactattagatggcgcttgctttaggtaaacacgcgttatgaagttattcaaccttggaagaggctggggaatatgtagtaattcagctaaaataaggcattctggcatcacaatccccctaaaggagatcttgaactctcggaattgtaagctgcaataggatacaccccaagctatgagacgccagtaaaaccaaatgtataagctgttgtatacagaatctcggagttgagtgaggatgcatttcgtatatcatagctctttcataattatttcgcatacacaaagactatactattggcatgcgataagctgtacaaactggaacgcagaaagaaaaacaccgacacaatgactgaccaataccaactccaaaccaaaccaacataaccgctagaccaataagtcgcattcttaattggtgcgtacatcttccaacactaattcacaagacaacttccgcaatcacattgcctagggtactcacacaccatacagcgacaagaccccacccaatccggcgatccattctccaattgttcaaaggaacaacaatcaagagcccaactaggatgaccagaagcgtcgcgccgctgataacaagcaccttggagatggcgatatcatagggggcctgcacaggagcgataccttgcagcccctcattgtgtctctggttcccgccattgatggtcatatacagaccaccaagaccgatacccaggaggatgttgagcattggtccaccgaagcaggcgctcaaagccatgaccggatatccgagtcgggcgactgtgatatcagcgactagatcgcctagcgagtttccgacggcgaagatggtcaatccaagtagggaatcagagatgttgaggataactccgatggttttgaggagagacacaacttctgtagcgatcgtcgcgatccaggatatggcgactaggaagccaagtagggagaggaagggccgccattgcggtgggaggctgaggatgtcggtttgggatgtacgcgggaggaaagggatggaaagatcttcactgggacgtcggtggtttcgttgacggcgagtgcttatgatcagggctgtgagacagacggaagagaataagagggagacaagggaggggaggatgaggttgcgcagccgacgatcttcgtccacggtcgtccaggtgatgagcacggcgaagaagggacctgtgaaaagctggatggaaaccagccagcgattccagtcctttgttggtacaggatgcgcagaaggtgaagctggcctcggcactgccgggagttccgagtcccatcgcgggcgaccagtgtgttcatgaaaggactttcgatggtggtgcgttggcggcgcattagaagctgacccggcgtagtcatgtgcctgggccataatcactggactatcggctggaagtctaacccttggggagggatggtctacatcgctgacgtcctgaataatcaccgagggtatgggatccagttccaccgactctggtgcctctggctcgatgacggggaccgttatggtaagaagcagcacactaggagctgcgataataccgagcagtcgttcccaaacatttttagacttccagcccgccagggtcgggaagagcgtgcaaccaatctgctggggaggggggatcgagtcaggccaccaattcctcaggtatttgggaaaagggaggcctacatgagcgaaatcgtcatacccatcgtgaacttgtagcagttctaactgactagctgaatttggaagtcgaatgctgggtggtcgtgagaattccatggagggtatatcagtatacaatgggaagggcactgaagggctttctaacccaaagcctgaatgacggcgcgtcgtattgcccctgggagatactgacattggggaccgttcatttatccccccattgttgtaattgggggaattaaaaacgtctgatggggcgagccggtcaggagtttgaggacttggcgaccgattcgcacgcgacacatccagcgccatcccagtatcaatttgagggagatggcgcgaccgcatggcttcttgtcccgaagtatcctcaaaagaaggtctgctcactgtaagcagtggaccctgtgttggtcggggctccaaaacactggagtcaattttcaatcccacggcatcgttcgccgatacagctcgaactcgagaggaacctgctgtactagacggcgacaggcggtcgttagtggcagatggtcgactggcgcgaggatgcgatgccactgagcgtgtgtcaaaatcggactcgtagtcgtctgaatagctgttcaggcttattgacgtattgcgattcgtgtttctcgatttctgcagcgagtgtagaacagactgaaattctaatgccccgacaagacttgcccgaatgggattcattgtattacgcctcgtttgcatgggccgatagacgtgcatgttatcacgaatctcggccaagtaccggtttcgtgtttcgtcatcctcctcgtcctcctcgtcatcttctttccatagaggaacagcctcagcacgctccaaaatatcaaaatcctcagttgaggcgccgcggagcagacttcgtgactctgacgctacaccgggatcgtcgtcctcgatggtctcttcgatctccagctcttggttttccggtatatgaaagtgagctcgcgctgcgaggtctctctcgtgctttctgcgtcgccgtaccatataccagtgccacgttaccaccattacgacatagaaggcgtacaagcctaccatcgcagctgcctcccatacatgaagtttcccatcggccaacaaaaacatgctgaaaacgacggccactatgaagtagcccacgtctcggacgaaacttctccgcgcgaccttgaatggccgaactaatgccatggagcccgcgacaacggacgtgatgaaagtggccgcgccgattaactcaccgattgccaagctcccactattcgaccgcatggcggcgaaagtggaaaacacgtcaggacttccattgccaaatgcgaggaatgtcacgccagtgagactctcgctcaatcctagaatgctagccaatgtactcagatcgatacacaagaaatcgcttgccgcgatacctatggtactgaagagcatcgataaccacaggatcaatatcgcgaatgctaccggttttgcattggccagcccgcaatagtagaattgaaggtaggagattagaccatcctcgtgatcggggcagttggcgcggacgtatgcacactggtttttgacgttgcgaactaagcgacactatcatcgtgtgacagaacatcaattagcctttggcaccatctcacagggaaatgattcgggaaggttaagatacctctagttcgccctctcgtttgagcaggtttatatgcggccctgtatccggttgcgcaaactgcccatgttcatttgtagtaccagttaggaaccaactcgttattgcaataagtgtaaacaccaacaacgtggtgtaaaatggtcggattgaatatcgtggcttccggacggcaggctgcaggaaggacagcagctggttcatcatgacgagaagtatggcggcatcgtgagccgaagactttggatgctgtagacaaacttatgccggaaatatcaacgttgaatactcaatgcatgtacaatatctacctcacgcatccaacagatgtgggtttgtatatggcacggtgagtgcggtgagtgcggtgatgtcagctgagaggagctgtggcggagctcgggagtgggccaatgcacttagtccgccgatcgttgttgcactgaggaaacaggttaggagggtcgatcgcagatagggttgtaactagtccaagataagagggtgagaaagtaggaattggccgttgaaggttcaaaaggatggaccgaagctaagcccagcttgggtacaaaagtaatacctgatattccaggcatccacggtccaggattacgtgatagatagtgcgtcaccggtacatctggaccaccgtatgtttgttgacttccccatttgttttgtctcatcgacatcaacccctctctccatagaactttccatttcaacgctgttatcgccatcccctatcgggggcaaccgcaaccatgccgcgtgtcgcaaacaaggtacatcgccgctctaacggcaactcgacgccgcacaaaaacacaccggccaagtacggatctggatatctcctggttatcgcattgaactaattatatcaggatacccctcaacgatgatgagggcgagaaggcagcgcgtatggaggctcgtcaagcacttcatgatcgccaaatgagtcagattaaagcggcagtcaagacgcctatgccaccccgtcggtacaccctcgatcgtgaagagagcgacagtcccgtaactcctcgagcctcacatcatcgcagtcgcaccagcgatgtcaatggccgtgcagtgacaccgatgaagcgcgtgcctatcttggccaattttgaagaatggatgaagatggcgaccgataacaaaatcaatgcgaataactcctggaactttgcgctgatcgactattttcacgacatgtcattactgaaggaaggagatggtgtaaacttccaaaaggctagttgcacccttgacggttgtgttaaaatctacaccagccgagtggacagtgttgcaacagagacggggaaacttctgagtggactggctgatagtcgcgacaagagagggcgcggggaggaggatgcagaggatggcgatgaggatgaagaaggcgaggatggtcagcctcgcaggtcgcggaaaaaggtatggtctatacggtgtcagagatttgggattttgactaactagatgtgtctagacacgttcccatgaggctaccctcgcgccgtcattttcgtcattgcaactaaagaagttcgagctagagttcgccgtggaccctctattcaaaaaagcatcggcggactttgatgaaggaggcgccaaaggcttacttctgaaccaccttgctattgatagccatggaagaattgttttcgatagcagcgacgatgctgtggatgatagtgcaaaaacctccgaagatgaccgtcaagaatctacggatcctgaccagcagaccgatgaccaagcaaaaccaaaccagaaacccgcaagcgacacatttgagaataacacggagatcgaccttgctacactagcaagccgatttttcccagatctagatcgcctagatgaacaagatatttgtccatcgcttaaaaacctcgacttgggtgaccccagcgggtcgctggatctccctctcctcaaagcgccagaggaatggcggcaagacaagatggacgaagatggacgagcacatgatgacccatctggtatcatgctggacgacgacaacgctgtcgggtttgatgacgatgatgctaccctagccggatttgatctcagcggcgacactgggtttggtgacggaggagaggtatgggctcgggaagccgccttggaaccaatgttgaatgttcaccggaccacccacgatggggataatgatggtgagggtgacgatggcaatgaagacgcatatgccatctccatgtctcatcaaactaatagtcacgaccacgagaatattcttagctactttgacaacgcgctacagaagaactgggctggcccagagcactggaagattcgaagaatcaaagaacatgccacacccgctacgtcggcgcccaagcagcgcaaagaaaaagagccatttgagattgatttcgctgcccctctggatcctgctgtcgcggaattgatctacaccccggccagctccaactccgccgtttcattacccaagacgcagtggaaaacaaagggtcgcaaccttcttcccgatgacaagcatttcaactcccgtaacctactcacattgttcctcaagccgaaggcaaagatgggctcaaagaagattttgggcaaacgccgccggcaggatttgacggctggtaatggagatatggacgaggcattctgggcaaatcgcaagccggaagaaaacgccggcgaggaaggtgctgcaggtgcctatgatgccaatttctttgctgatgacgatggtcttgctttcccgaacggcatggatctcgatgacgacgacaatctaccattcgcggatgcccgggagatgctctctccgccagcagacgggactgcaggcacatcggctggagaagcaggtggagcaactggactcagcgcgcttttgaatatggttggcgccacgcctggccgaccgggagctggtggctacggatcgcaattggtgacacaaggcggtcgtcgtgcacgaccagactacgtggcgtatgcacgtgtcgcaaagaaggttgacgttcggcgtcttaaaaccgagatgtggaagggcatgggtgagcgcctggttgatgcggtagactttgcctcagcttcacagccaggagccgtgtccagtgatgctccgaccgaacccgagagtgaatcggatgcccctgtcccgcctacacccaagggtgaaagcccagagcaggtgggtggtcggctacggttcacgcaaattatgaactccctcaaggaagtctacccgactgagactctacgcgatatcagcacctcattcgggtttatttgtcttctgcatcttgccaacgaacagggcctcgtgctggagagtgatcttagcaagatgggcaatgatgcggctaccctagaggagatcttcgtaagtagggatacgcacgctatcatcgaagagggaggagggatgtgaaagctctttttttcagttgcatgtacagttgacatgggtagaagcattacgatatgcatgttggtcacgagtgatgaacaggacggtgtgacttggtagatccttgcggcgttatggttttgctttttcctgttcgcagtgaatggcgctcttgggtattttcgcctcctggaattacttcttttgttttgatgaattcaaagaagttcatatactttctggtataatgcttaaatggtctcaagtcaaagtaggattagtttgtcacctcaagtgttgtatgccggcacgaacacttgccgatgctaggatgaaaatctgaggagcacattcatatgtatcattgcaatatattcatttgttggacaaaaatcaaaaatagaaagagagtaaatacacaacagtgtaccaaagtccaaataggtatctgtatctcacaccaagactccacgcgtcctagggtgtacattaaactccataacgaggagagagcaaataaaagaatgttgaacaaatgtccgattgtgaagcagatcgatcgaagatgacgacctgaattgtagttttgggattttccatgtttttttttttttgtattttcgttgttcttgggcactttcattccccaccagggaaaatggaatcgaagcaaaacaccctaagtcaaaagatataaaagacaagcttgcagtcatccacatttatttgcgtgcaggggccgggtacaccgggacggtggaagcctgatacgcgccgggaatcggcacggaatcgtaagtgcactcactgggaggagaaccccttttcataggcggactctggcgctggctgtgaggaggtggcgacggcgaataatgagaaggaggagcaaactcctcctgggcagtctggggggttggctgctggaccttgataggaggcggctggagttggaacgacggggtaggccgggtaggtgagcgcggcgaggcatactgagtagtttggggttgagccatgcccttctcagcagccgagtaggggtccacagggccgacggcgtagattggggtctttggagggtaggaagtgaaacctgtgaagccgggggtgttcggggcagattgcaggcgcagttgtgcgagatatagatctgaacgggcgttgtcacgggtgtccatggacttcatcagcttgcgcttgctccagacgcggtagaagactaccacgtagatcaagataactaggatttcgatgacgatttcgatgatggcacagacgaggccccagtcttgtagacgacaaaggagagcatagtcgacgctgttgtggtagatctcctcgcgggtgttctgcgcgcaggaccatccccacatgtccttggtgtttcccgtggatttcgagtgctggtaaattgccgcgccgacgacccacatgatcaggttcacggcgaaaaaggcgatcgagaagctggtgtagtagacggcggccttttcggcgcgtccgtggccgccctttcggtaggcccagaacacgatgagacaggcgactaaggaaacgcaggacattcccagaaggagatactgagcccatgggttggttccctctgcccaggcaggaagactgttacgagtcggcaggtgcttggttgcgttaaaaacagtcaatgtcacggctaacagagacagcacaatcagactgcaaccgaaattgacgcaacgcaggaagatcttggcgattctgacgcggagtttgattctctggtgacgattagtaaatagtatcgattggcatcgtgggctttcttaccaggtctcgagcattctcgacttcagccttcttttcttgcttctcaagcatgtactcctcgcggaaagttggactgagcggatttaacgacttggccgtctgcggcaccttcaggtcaggtcggaaaggcgacattggcacctggtcattcgcatgctcattgttcgctgccacataaccgaatcccacatctccaacatctcccttcgcctgagacttgggagggtcggcgaaaggtgatcgtccagcttctgtgcgatcaatgggagagtgaattgatgtggcctcggcgaatcgagcagtgcgcgggctcttgagcgaagcattgctcgtatcagagtcgctgcgagtctctcgcacggtgtgttgtggtggaggacccattgcactgtggtaagaggcacgggtgagatctgtaggaacaactggctcgtaggtcagaggggagttgtctcggctatcgtctgataccgccattgaatggatgagcaatgcaggcaaataaatcaaacaattaggtcaagagaaccagctcttgacgaccactggactgattgttgggaatagaacgaccctaaagtcgatacaccaagaatcacaagtgtggtgggacaacggctgagctatatcaccgctaccgtgtgcgaagcctgcgtacacgagtattaagtagcagatgatcgaaaacaaaaaaaaaaccaagataatcagaaagtgacaggaaccagcctgggcacctagaatatcaataatgttcgagtgcaggcatggcccgagaggcgggggaccaaaatgcaggcttttgattctcatcactcgagttgggccagcgtaagcgccgaggaggaatttgcaacagcgaccagggacatgattggaagacgcaaagcctgtcaagccctcttgctgcaagtgcactgtacctcgatgcttgagaggggagtgtgactggccgacgggagtgatcagccaagcttgtcacggtggagtaaccggccagtgagattgtgtagcggccatgctcactcctcacgatgcacgtccatcacgtccatcacccccagcccggcgctaatccgccgatcgtccaaccacacagaatgtagaaccgctctactccgtaatagtgtgtgagagagatgaatgagcggtccgagggaagatgtgactggaggtcaacccaaaatagaggtccagtcacatacgtcgattaagcacctttggatgttgggatgttggagaggggaaaacaccgagggggtctgtgcacgctctgctatttttgccttgaagcagagcgtgtcacactcgtgatagtgatagtgccctagctcatgcatatgtctcaatcctgccgactagcttttctggggatctctccagtatcccgtcttatttttatagaaagtaaattgtccacttatcttgtcataccctattcccgtcttccccaagctcttcgatcttaatatagaatctaccgagttttatatgatgagcacgataattcctatgcgtgaataccaagataggtagccgcccggacgggaacgccatttagttagctgcagatgtgcatatcacgtcagcccagtcaagagccctggaggtacctcggtatcggtatccctgtactctctttcgcattctcttctcttaatacctccagttctccccctctatcaatgtctgtcagcttcatgaagaaaaagaatccagtgaatttgtcgctttcagtcaactactccgtagtcatatcacagccatatatcgaatatctgtatgatgggatgctccataaaggaacggtttaaccgccgactagaaaggcgccaagctcgcaagcaactgatgttttcttcatcatcaccgaaagagataggtgcatctatgataactggctggccaaaagaagccagagtcaatgatctcaaaatagaattgaaaagcgcctctgatatcatgactgggcaaagaaataccgccaataagatttatcatgagagtactatgaacactctgattagtattggccgttttatgttgatggctaatacatggcccctgcccaggtgcgcattccaggacatattggtacaatacgtacttccggaattcactacctacactctttgggattatacaattatattattttactacaaccatggcatcaataccaccccaacctggaatgttatttaaagactgggctctcgtgatctgaacagagagcttccagccacccaagacggattcagtgtccgagatatagctggggagtttgtagatttggggagttgaattcggccccattgggtagactatataaagccaagatacggttagagacggtatgattcgtaggcgcattaagttagccctggagttgctgtcaattacctgagagatcttatcttttgtacgatctgagccagttcagattgatctgccggattcacgccatatggtgccggtgttgccaacactgaatccagaaaaccgaaaatctgtttattcttgttagatgtatttctctatacgatacctctggaataacggagtggatttgggttacctgggatcttttccaagtataaccaactcttagatccaaaaggccaccacatgccggcaatatattctctgcgaacgtgctcggggcatgcgggcccaaaccccctggtgtaacgtgccaggtcttacaagaaagagtgcattcaattcaaaataactaagatgaggagagaaagaagaagtaagttgtgaagtgggaagcagccagttattatagctgaccactttgcaagcgttgcaaacaaccaaccttctcgcttagctactaacaaacaatctatggaatgcaaactagtaaattatgcaaacagtaagcgagcaagcaaacatgaagcataatgatagcgatccatgtggatcgtgacatacttaggcggttgctcgagcggttaacagagcagtttctcaagcagttatataagcggttgcccaagcttagtttcttaagtagttgctcaagtgattgacgatgaagcaattaataatgatatgacaaaagggacttaattttattagtggtttacatacaaattgtaggtacctactgtcttactactatcatatgacaggaaatatgctaattgtgaatgcggtactgaaattacaggcaggggggagaataagccagtcagagggtggctttgcgtagcattagaagttggaatcagtcgccttgctctgcaacgactatctagagacctatggccgtcgagatccctagtatattagagactaagaaagcgagctatgatgtagacgatgaagactgtgagattgcgccctcaaaactgttgagaacccacttcactgaacataagcacccgaagtagagtcttataatcgtttcatcactgaaattatcttccgtatgtctgatatttaaagatgacttgtctaaaaaaagactttgacgtcatcagtggcgaaaaaagccgcgcatcttttattgcacctagcgagcataagagaccgatagacctcttgctgtcaaattggatacagatgctgtatttgcagtctaatgagacttgctgagatcttcaaatgccaaggttgtaatggcaacatgtgcctcggaatacttagaaacacccttggagtgattaaaatacaacagccggcattgtgagagaggcgacttaagaggtggagtgttgcccacggaggtgatgagtaggcagcaactgtgttccataagcgggattgctttgggacactggccaatcatgtcgtacctcaagcatacactaggtaatgagacatgagtatgtactccgtacaagaagtagtattagttggggtatctgccaaattcacaagaagggtattattccagaactattttaaaatagtctatagttggtcttggcattagggtggcgagaccgatgttcagaagcactgtggtcgttcataggatcaggagatattgtccgtgccaaacctcaacagcccctggaccccgtttctacataacgtacccatggatgttctaatataattggctcgagaaacaatgataccaaagaatgacacctgctatgatggtcaggatacattgacagtcataaagttcccagcagaggggcttgagggagtggcaagagtggcaactgcgtgaacatatatcctacgaggagaagacaatgtttaggatgataatttgcataacgagaatatatgggaagtcgtatctgttataagagatgatatagttaatgcttgatctcaacgctactgtcggtagaatatcaatcctctcgaccacatggactgacagaaacgttttaacttatcggagacttggccacgaagcttcccgtttcatgcaggtatctagagtaatatatggatgacaagtaccagccacaggttatttttgggagtggagtacgcagccgtcaaggactgaacaaccttggaaggccgctagaacactccacaggggttccctggttctgaatataatgcgttgcatgatagattagatacagctgtcaatcaccgtaggttaaaagaaacggtactctctagatgctcatggacctttgtgccttggagactagctacatagtatatatgtatgtagttagcatgaccggcgtggtactgtgccatggggctctgcgaggtcgatcccccagccacctgaggcgcctaaaacgtacaacgttataagtacactgcctgaaacatggcgcagcaagtgtgttgcgccttgtgccaccagggtgatcatgggcaatgggcatggacatattaataaagtaattaaagctgttcaagaaatcagtacattacatagaacttgcgtgtattgtatgtagtacctagtgggtacatcggcactacagatctccacaagatcaggcgttctactgaattgagaattagaatgtattacatacaatatattatacgcgggtctccggggtgacatcagtccgattgcccctgtatatgcactccataccaagaccatggtagtaatagagaaataccggtttgaagtgagatgatctcataccgtttatacttaagcctcaagatgtcgatcgtactagatagatttctaaccttttctaatgaatgtaagtgaatgcaattgcattgtaaggcaacgtggacggaagagggaggtcagccgcaggaaatgccccacgagccagccacaaagtgttagcggtctacacagcctcaatcctaattaagtactgtgtacttgttcatacagagtatctgtattgtaatatcaagtcctcagtacctcattacctcagggttcatttctccagagcctcgactctccagtccccaccaaacatatccatcccctgcccagtttctgttctcacgctcactttctttgtgtcttttcttttttgccttcggatcttagacgatagatgagtgtaaatggtatgaactagttcattaccatccacttttctgttcaccactcacattcttccatctcttggtcttatttcgttcctgcgccccgactgttccaaccttcagatggccattgaatctcatccactcattccccgatcgctattttaaaggcctaagcccctgggatcattcaggtggatcttgagaagtttgaagctgaaaccactcgtcagcttgcgccacactcgtgagaaacgccccacacgccctggtcttcgctctcttcccccccaacctcgtctgcttgaccatctttgatatatcccggtggatgaaagttagtcaagttcatttcccccaccaatattccttgcattatcctaacatggcatctaaagtagctttcgcctttgctcgtccaccctttgaggctggcgcgaaacattctttctccatggcgacgttgatgtcgaacaacgagcccatcactgtctccaactcgctatccgcaaactctattaccagctctgaacccctctctttattcaagtcttccaaacccgaaagcctgagctcgattgccagcgccggcctacacgtctcgcgatcaagagatcaacttcctccgatgacaagtccaatatcactaccggcggatcggccggagcatgagaaggacgccgaacgaaacagttcacaggtggctcgggaggctctaggtgcaagtgaaaagtcgccaggtgccccgaaccatgagcattcagtccatgcatccccggagcagatgcaaatcgactcacacgcgaccgaaccatcatcggacccatacggatcaaacgatcatcaccacaactcactaatgcatacttcgactgtagctagccctggtcctattgaggaatccgcttctcaagatggagatcgccggtcgcgtgataactccgagatcgaccacgatggcaaatcattctcatatccgatgccgacgggtaacattaacgatccgcgtcgcggactgagcctaccgaccgcaggctaccatcgaggcagtcctcgctctccgtcggcgaagaaacaccgctgcccatactgcgcgacagaatttactcgtcaacataatctcaagagccatctgctcacccacagtcaggagaagccgttcgtttgtcaaacctgccagtcacgtttccgaagattacacgatttgaagcgccacgcgaagctgcacaccggcgagcgaccacacatttgtcctaaatgtggacgtcgttttgcccgaggtgatgcgcttgctcggcacaataaaggacaggggggctgcgcaggtcgacgcgcgagtatgggcagctttgcggcagatgacgactatggcgatggtacgaatgggggaaccgacgacatggatgggttgatgtacacagcagagcctgagcgcatggacgaagaggacgagcgaagaatgaccatgccgagcattcgcaagcacgaggcagatacagtcgctcgatctgattcaattcactcgcgccagtcaaacacttacccgccaattaccgccggtcgtcccagccaccttttcccaccgccagcaaatcatggtggatcaggcgtgtcaacatcggcttcacagtctacacacatgactttcccgcctgcgggactcacctcgggctcctctatcttccctaccaatagtatcagtgatagccctaagcccctgtccccgaatgcgctctcatcgcaacatgatagtgcaccgccacatcgcgcacactctcccagcatgggacagtccttgccacacccgcagtcctctttcggacgagcaaatcaatcttcaaatcacgcaccacctacactaggattgactctgccgcagccaggcgcgccgcagctgcctccgccgccgggtatgacctccccggatgctcgatttggcatgcaagctgcaaccaaacacactccttcgcatagccactccagtacccacagtatatctcatcttaagggattcgatggggcggatgccaattccagtgacgccagccaaatcgataagctttgggcgtacgtgcgaacaatgcacgacgaattgacaggcttgcgaactgaagttgcggctttgcgggcgcacgttgcgtcgtccaactcgatgcccccggctccggtagaagtaaacttgaataactccggaccgcggtgatacgtccttgggtggttcttgtacgatatggcgtggctgaccatcagccacgtgaactggttgttttgtcctcccctccttctccactttgtccatacgccttgattatcccatcctcgtttgagggtcaaacttgatgccctcatgatcaccctgccgacagttgccggcgttggtgttttctatgccccgttattctctttcttttctttctcttctttttttccccctttacccccggagttatgtcatccgggagagcctttccgttctagcctactttattcatacctggagtgcgctgcaaagtgtgtcctttttccccctcttcctttttttttttttgagcagccgaaggagtttggcgtgtcaaacaaaaaaaaatgatctgagatcgcgatggaatggagaacattacttctcattaaactgcgaccttgatcccctctgtcctgttgtcgattccataccaaagatggaatcatgtgattgtgtttggatatgtgcatggattacgctggatttggagtttttattcgtaatgctgctattaccgatttagttagtgataatatactcttcaatcagtcagatgaatgggtacggtataattgtttataggtagatgcttccccgtgggagacggatattatcttaaacatagcaattattctcaattttcttttttcctcgacctctatcatgttacaactatatgtccttgtggaagacacggattggagactgaggcatatctgctccagggatggtggaatatatactgacttgatgccaaagtcggcaggaacaagtttgaactcgtgatcaataaaccccacttgatcttctatatatttcccttattttacctgcccgggtgccatcgagacagacatcaagaaagattaacgaaaaaccaacgatacttcgtgactatgctcctagatgaccacatctccatggatagcccaagttaagagttaaccaatatgactcccttctcctacacaatccatccatctttctcaaatacacccaagagtctccttgatctctttccttgtatcataaaatgacctctccgctgctttcacaacagataagtctcatctcaccaagactagggttagcggattcacgagagatcatcttcccatttgaccttcgcgtatccccgtccgagttctcgggtcagaccttcaagctactgatagacctttttccaacaacactagcagttgaatttgatgatagggttctaatttattgtgtccaagtactgccaccaaaaccatggccaaagcgagttgcaggtgttccgtgttatttggcaaacgacgcaaatgataaggggccagtcattcccctttgctaccgcagtcgctctcggattgatatctctcaagatctcaatctcagggatagtgatgcttcactcgacgtgatatccgatttgttacgcggctttttcgcaaaagatcaaatctcaaccactaaatcacttggccgtcatagctcttgatcaacaaattgaccaggatgaggttcttaaggaccacattctgaggtctgctccccgctctgttgctcgttgcacctgcttatatctttcagagcatcacagggatagacctcgcgcgctatctgctcaacggctgctttgtccaaagcatatcagtatgctaatcgagatggctcctgggcctcgccccataccagcattagccctgaaccatcatccctggcagaaccaatccctcctacacagaatactgcccctcctcagcaagaatgccaatggacgattctcaatacactacgttgagactaggtgtaatggtcagctccaaattccgcaggcgaatcaatgcgttcgtcctcgggcgttctcgtcaaagatcgtctgggctctaaatatatgacaactgccgctcatagatttccattcgataaaaatgtctaccatccatctctcagcggcgcaataattgggaaattcaccacagggctcactcatacagacatcacattgatgaaactcggtgatggagtagactttgtgaatgaaccgtttggaaatacgtcgacactagccagtccttttcgactcggagatttcattcgaatggcagaaacaaaacgacaggatttggtattccttgatagcccctttaccggtcttgtcgagggcaagctgatgtctaaaatatcatgcgtgttccatctgacgaccaagatcaggaaatatgggtcaaaacccaacggaactaaatggggcaagactcagctcatgagctggtggacggtgcttatggctccgccatctggaataccgatcatcgagttctgggctttctcagttatgcccctggaacaggactctacaaggatcattgcttaagtattgcattgctgctgctgatcatcttcccgatagggggtatagcatggcctagagaatttatgtctctcaattcggacaaactcaggggtcagcggccttaggatagagtaaatattccgtagactagaatataaaaacagcgatctacagccgaggcacttcaaagacctcacatctcgacaaccctcggaaaattctatccggaagcacattactctatacagttttgaaatgtctatcacactcctacaggcaccggctgcatcctttgtgttgctttccgttggacatactgtatcattgctagactcagaactcccttaaagaatcgtattgattgtttcgtagatcaagggcagacaatggacagccgatccaagattcaaagctatcgcgggcacgaatttgtggacttgtgggactctagggtggtaccaggtgcgttgaactttggccttggtgtcttgttcaatatcaaccacgctttatactgactgccttgatcggtttctatcaacaggggagcgggttttttctatcaactggtaggctcataatatcatttctcttagccaagtttttaaccatagtaataggtcttcttcactggcaatggtcacaagatccaagtctcctccaagatccactgaacaaggccatggctgggatcgtgaatatcatactctgggctagctctgcctggtatgctaagcagggtatcattgatacttccattgtccttggtatatctgctgcgttgcaggctttcagcgttggcaaggcttgcctgtgaaatcatcgagaatatatgtttgaatacttataggccgatcggatgagcttgggtgtcttacaaagagatctatcgtgcttttgcactcgtctgcttttgatttttgaggtttagtatgttgatgaatcatgatcacaatccacagctgttgaaaatttccgagatgacagtaggatgaaggtcgacaaaggcacccaacagacaaacaacaagttagccctcctccatttgagaatcctgctccaacctcgtttcttctctacgctggatagtccaccgaataaacaatcccacatcagaaacaacagcccgcggaactccacccagcatccagctccgttgaacccacttgggaatactcccaccagcctcagaagtcgtcaacatagtccaccgaaggtagcgatcagtagaagtagcgggggtattcaaatttgccgtagacgacggatccgaagaggccggagtaggaagcagcagacgctcaacccgctcgagactggcatagtaagcgaagactgcccgctggggaacgatatccatgatctgggcatacagtccctcgaattgggatcccggcatcttcggcttaggcaaatagaaaggaacctgtacagtcataaacccgtggcatgggctggattgggttgctgggtatgagctggcgaaagtcgccgacatagtccaggatatgaaggcccggggccggattagtgcgcttgggtggaaggtgtggacaataagattgactgagtttgggagttagtaggctgtccttgtgcatgagttttcgggatttttatacatacgttcgacctcgaaatgcttgtagttgatgtttccaacagtaagtggttggttgagatcccagtgtctcggctcgttccacttcagcagttgctttacgctcgtcacactgggtgtgtactccatctcgtgctcagcatggttgtatcgcagcccgtcgtggaattcccatagggaaactgtgccaggcaaacgatcggagtcttggtggtcactttggcgacatacccagaattcctttttagattttgagtcctcttggggggattgcagtgctcgccatccccgtgaaagcttcacctttgcctttgagggtggagaagagcgcagcttgcagtctggtttcagcgtcgatggaaactggtttaggagaggctgagcttcaactaggatggcgtgaataaactcccgcagatctggggtgttggcatccccttgaagatctgggtgacgagggaggctagtgaacagatgtggctctagttggattatcggcatgataggggatgaagggaagaaggcttggcgatgaagtagatgtacagatgtacagatggagaaaggtagtgaaaagaagaagtgagaaaggaaatcaaattttaatacaattaggtctttcttatttgtttgcgcagttcaagattatgtgagaatagaaggtcgcttgtttagtcgctggtttagtcgcttgtttagacgatcccaggaacacaactatattctcgtgaagacctgatcaatcatctgtcaagtgaatcttattgatcaaattaaaacttgggcaacaatttatataaatattatagagactatagacagcggatcccaggtccaacgctgccagtctcgaacatctccacaagtcccgcgcctagtgcttcctctagcgcccatcgaaagcgcatcccatatagctctttccatttcttagtcctacccggcaagacccctgcaaactcgccacgggctcgcttggccaagtgaaagctcttgtcggtttcaacagctccatcccatcgatctttcaacagacccagaggggcttcgccagaagcggaccgccggagaagagcgagcagatgtgcacgacctgaccctaacaagcggagatatgttcccgtgttaggaagagacaagaacagagttgccgcacgagcctgcgcatttgactgcacagggcgctcggagtgcgagatagactcgcttcgactggctgacgaagtcgccatttgaggtagattaggaagtgatgcaatacttaatgtgccctgtgtgtaagatgaggacgagacaataaagccggcacgtagtagcgccctgtactcatccgttgtgaagaccccctgcgatatcgccgaggatgttccaatccgtttcagtatatcaaggaatttctctgcaaacttgtcagttggcgacgtccaaagaatcccaactccaaaactcacccttcactggttgttccaatgcagggctttcctgcaccagcttgtcccaatcctctgctagcaccaaacaatcgcccagccctgccgcgtcgttgcctcgacccggtataatgagtcgccgaatccgaccagcctgaatttgttcgacgatttccctctccacctgtgtcggtgcctctagaagggtatggacatgtgccacagaggcgaggggaggcaaagatcggcgtagattgaggacttctgcgatacgcgtgctgttcattcctgcccgtgccggaagttcttcgaacatgccatcacggatatattgaatagcctgcagcacattctgaaccggtgcagtctccgctatgaaatgagacccgcctacatctggaagcgggtcatcgaaacctagatctgcagtcggttttaggctgcctccgccatatgtaggttttcggcgcgcaagggcggcaaagggcgaggcgcggggtttgggagcagaggatttgcgtttcttgacaccagataccggagcggaggtaagacgtaaggtcatggcatgggtgtgtgaacctttcactatgcataacggattcggagagaaatattgccttatgtcaggtgacagctagatattccgccaatcacagccgatctgccatagttctgtaatcaaataccaaaaataccgtacgggaacacccagaccctcaagtggggtaaaagcggtatgtcacagcaagggaatggataagttgttgtcttccctcggttccgcgatatccttttggcttcaaaggacttttaagtgatattcatcgtcatctctgattctagccctcgggcatctagatttgcctgtttcttcttatttgtcctagcaaatccacagggcaaacttgcttctccatcacttggcactttcacatgacgtagtcatgagaaacgcatcgtgtaactaacatttctttttcttcagcccccggtttttaggactctaacccctcgtttgatggccgcacctatccattgctattgtcaagaaggtctatctcatattgctttttgatattattttgcctatccgcttaggctcggctcaatcaccatgacggtcttcatagcatctctgtatgtggctattactggacctggaactatatatggctaaccggcgaatttcttatatagatttttgccctacactatcgatttccacatcaacaattcgcgcgcccgctctccccctctaagtcctccaagtcctccgtccgtgaaccccactattgaggggatcacacccatccccaattctaccgctagcctgtttgagaagaaccttccagggcaaacaccgggtcttacaccaggagctacaacggatcatgagcgcatatttgctgcccaggtaggcaagacagagcacgagacaaacgggtacccgttccctttggccgtcgagcaggataaccggctcctcacacggagtgagggtcattccccggtatggggtgccacaacctcgctcaatcaaccaaagccggcggcggtcatgtcgccgtctccatccattctcaagcaccaagatcctcgccccgccaaggaacctacgcaccggcctcctgcagttgagaccattgcttcctatgcaagactaagaaaggccagcacagcgagccgaaaattatcattttcgaaagctgaatggaccatcgagaccgcggagcagggcaatggtggcctgcgtaatgcagtgcgatccgcaacagacgccggaggcttggatagcatgatgtgggtgggcaccttgggtatgcccactgacgcgttggcaaagcacacccggcgcgacatcgcggagaaattggaagatgagtacgggtctttgacggtttttgtaaatgacagcgactttgatgggcactacacgcattactgcaagaccattctttggccggtgttccattatcagatcccagataacccgaagagcaaagcttacgaggaccattcgtggatctattatgtcaagttgaatcaggcttttgcagatcgcattgctaagcattggaagcggggtgatgcgatctgggttcaggattatcatctgttactggttccagctatgctgcgcaaattggtgccagatgcacaaatcgggtttttcctgcatattgctttcccctcgtcggaggtcttcaagtgcttggcgcaacgcaaggagctcctccagggcatgcttggtgccaaccttattggcttccagacagatgaatactgccggcacttcttgcagacatgcagtcggattttgtgtgtggaagcaacacccgaaggaatccagttggaagacggttttgtcaacgtcggcacgttccctatcggcattgacccaacttcttgggataagcgccgccgggcaacggatgtggagcgatgggtccatgcaatctcggagcgctatcaaggaaagcgtctcatcgtctcgcgcgataagattgattctgttcggggtattcgccaaaaacttcttagctatgagcttttcctcaatacctacccagaatgggctgataaagttgtgctgattcaagtcgccaccagcaccacggaacaaccagagctggaagcgactatctctgatattgccatgcggatcaactccacacactcaaccctcgctcatcaacccttggtattcctcaaacaagacttggccttcccgcagtaccttgctctcatcactgtggcagatgccctgatgatcaccagtctacgcgagggaatgaatttgactagccatgagtttgtctactgccaagatggtcgatggggcaacaaagcctacgggtcattaattcttagcgagttcactggcagcgcatctgtttttggaaatcgtgctcttttggtcaacccttgggattaccgccagtgctgcgaagcaattcacacagcactgactcgcgatgagaaggaacggaaagaggtttgggaggaaatgtaccgtgcggtcctgaagaactcgactgccaattgggtgaaatcgttcaatgaaacgctcacccgtgtatggaacgaacagtcttcgcgagaaatcatggcagtacctcgactgtccgtatccaggctgaccgagcgatatcgccagtccaagcaacggctcatgatcatcgattacgaagacacgctcgcctcttggggatcaccacgcagcatcattctgaccacgccgcagcgcgcaatcacaactctaaatgaattgaccgaagaccccgctaacgttgtctacgtaatgagtgcgcgtatgccagaggaaatggaacggctgttccggcaagtcaacaatctgggactaattgccgaaaacgggtccttcgtgcgcgagccgaacgccgattcgtggacccagcttgcagacaagaagcatgtcaaatcatggaaggcatccgtgtctaatatcctggcatacttccacgctcgcgtcgagggtagctggatcgaggagcgccattgctctctagtcttccaccatggatccgccgaagaccgccaagctgcggctcgatctgccgctgaatgcgcaggcaacatcaacgatgcgtgcgctaacctgggtgtgcatgcgattcccgttgagggtgctttgatcgtggagaccactcacaccaacaaggcatctgcggccgcacatgcctggaagtggtatatggcaaatgccgacaaaaagaaggatttcatcaaacctgacttcttgctggttatcggcgataatcgcgaggacgagccggtcttccggtgggctaataaactgcacagcacaaaggccgtcgactatgctatgactgtcacattgggctcgcgcagcactgaggccaaggcaaccttgacacagggagttactggtaagtctggatttattctatttttatttcggttgactaattttttacaggcgttctttcctgtctgcaacaattggcagcacaacaggccccgaccaaactgccattgcgagagtgaggaatttgattgacttcggatttccaggacatgaacatgcgaagacgaatacacgaagatagcaaaacggaccggagttctcattttctttagcaactatgatttggtgctagcatactattgcggcgcattttggatcaagttgagacagtacatacatggatatggaggctctacaggaagacatatttgcattgcatcttctaataatttcgggttaaagtttagaaaagaagaaaaaaaatatgattggaacaacagggaactttcctggtggtttcttgcgaacagttaaagctcagtcatttggttagtcctcttaagacattttataattttatatgaagcatctatggatgtcaaccaagcgaggtatgattgtttctggcccccgactgggttggataggataacaagccagaatcaatcccacctcttccctattttcagccttcactgtcatcaaacttcaagaattccgaggtggtcatgtactgctaggaccaaataggcaggtaccccccaaatacaggtaggactttcctattttagcgtttgtgagaaatacgagttcaggatatgcaacttttccagagaccaaaaaagtattatgtttactccaatcaaaagctatggtttatcgttaaccagcaccgcggcacctacacagcggccgggataccagacggcaaagagaagagccactaacgcaataggcgcgaattcaaggcatgcgaaatagacctcattggtttgcagctctcccatgagaccctgggcggtttccgcaagacggaagatagttctcaaatagatcatgagggtcgaaattgaaaaagccaagcagaagagcccaagcccattcgctctgatagcaagtcgagctcggaactggaaactcgccgccacgataacaaagatagtcatgacaaagacctggtatgcgaggccgcccaggaggatattgttcgccgttgtgggatcttcccggcgcgactctgtaacgccaatgagacacgcaccggcgatctggacgattgttgagatgacatccgaagtaatgaagaaggctaggatgacccttggaggtaagaatgagtactggctccctactcgtgggatcagtgccgatagaatcgtgtagacgccagcggcaagcaatacaggtgccacaacgataaaaaagtagttgaggatgaagtagatgaggtgatagggatccttcttagcggagagggatcgtgcaatgtaccctacaacctcgaaaaccagaccggcggaaaaggtcatccaccaccagctgcggttcttgatagattgagtcgtgtggtagacgaagtgaagaaaaaaccacgcggctgcgaaggcagctagggcaatggaaggagtgtagccatagatgatcacgggggtgtcattttcgccgcccggatttggaaagtaggggtcaacatagccatatgagcgtgctatttttccattagtgatctgaaacgatggccctggagagctgcgttcaagtgcggtgcctgtgatgtagtggaccatcttttcagccctcggattcgccgcacaacagggtcagatcttctctatgtagtaccgatgaacacgctaagaaaggaatttgcctcattttgtagtctggttattgaagggagatttagcacaggcccctttacgcgagctgccaagcgtaatgtcgcatagcccaatccagaatatctcgattgtttcccgatcgggcctatcgcaaggtctcatctataccagaggacctgctaaatttgatcccttgttgttcgcacagccctcttacgtcggccacaaatttatgccattatatatctcttgacttcaatgtctgtgaaactttggaaaaacccacgtgtcaaggcttatgagtagctgactcagcttctcggctgtccatagtctggggaataagccgaggttcgccgatgtcgtatctgtggggaagaggttcaatatcagatcatataaatcacattccttagacctttagaccctcccatctaacccccgtacatatcaaacactactgcagttatgtccactatcaacccatcctttcaggaagccatcaaggtcaccccgcaaggccacaacaaatacagcgccttcctccggccagaatggtgcattggaaccggtatagtagaacccacgtaaacaatcctctcccattgacccaagctaacaccccgccagtcccacacggcggctacacaacggccgtaatctaccaactagcgctaacgcacttcgcgcacgcccacccaacgcaatacaaaagcgccgcgtcgccaatctcaatccaactctccttcctgcggcgcacagcctcaggctccgcaaccttcgaagttgaagacgtcaagatcggcgcgcgcaccagcacaatccacataaagctactacagccctcggagaaaaagcccggccagctggacaccatggtcgccggctatatcactgtcagtccgccggaggccgaggtcggaattagcgcgagcacagggtggaaaccgtaccctgctccggtggcaggctcgcgggcggacgggtccgttgatctagcagcgctgggccgcacaggcactgacggcgtttggacgaagctcgagacgcctttttcggatttccgtaaggctgcggcgcagatcgagctgtttgggcctggtgctggcgcgacgcaacagaagcgctcggggaatatgggtattgatcagtgggcgaggttccggcctgggggtgatgtgaatggccgctggacggaggctgcggtggcatatctgattgatatgtttcctatggtgttggatggatttgatactatgtctgctactgctgtggctgaggagagtgggacttcggttgatgaagagaaagcgaagttttggtatcccactgttacgctcaatgtggatatgaagaagcatcttcctgctgagggggtagagtggctttatagtcgggttgttactaaagttgttagggatgggcggacagatatagatgttacggttcttgatgaggacggagaggttattgcgctaagttcgcaagttgggttggttgttagtgctagtcggaaccttgggactaggaagatggagaagttgtagatagtcgttttaccgatatatatatacatgttttgagaatagattttatgtgttcaacgcaggcttagtttatgtctatctatatatgatctatctgttcacttctgtatgtgcaaatcgggttttatgtacgggatcgacatccccgcatgtacatcagggaagtcgatcccctagtctgtgcttcaagcttcgagcctggaaagaaaaggacgctcacaacttcgagtcagaggtcacaatccaaaatgccatggcatccgccttgacgacctttctcttggtccactccaaatgtcctccagtctcctcctcatcctcctgcaacgcctgcgcccggacccagaatttcttgccgagcctcccaacaactcgcgctttgataaccagcaaagcaggcgtagtcacccgcttcttatacctgacatccagttgtgcggtaaagattttcccgcgcgggttatcctcagccataccgggcgtagtgggcgcattggtatgcgccgcgacagcgagggacatggcctcgtcaatcagcgtcgcgacaatgccgccgtgcgcagtggatgggtggccagacacaccggggctgctaaggtcgaagatcataatgatgtccgcagggttcaggcccggggtgggcttcgcgacagatgccgcatcttgttttgttgcggggagccaggtgggggcttcggcgggcgcgggtgtgagattgcgccgttgcagggttagacagtgggggattgtggtaggtgtgttgagggtttgtgcgaagtagccatcttcaccagttgtaggctttgggcgtcgtgagtcagtttggattggtgtatattcggcagaggaaatgagattatttgcccatgagttggagcggaggtgcgcgatggcgggggccgggtcagccatttcttctttcttctttttttttcgctggtattttggtctcggggattatactgcaattgtcatagttgaggtgcagctaaaggacctggcatgaagtgtttcagcggtttcagcagtatgttagggcgccaacggtgtcacgacataaattgacctcggctccggctatgaccgatcgggacatgataaacagtcacgtggatatatattggatcaaatcacccagggtccaatggatttgcaaaattgatttgcggtggagcgaacatcaaaagcttcgaagtacatagatatctgtatgtattccctttccttgaattgaagaaccaatcatgccagtctcgagcacagacaatgcattgtctcacccccggcatgtaaccggtagttgaccgtaagggacccgatgggggaatctgggaatccggacaagaatgcgaggataaacatagtcccaacctaagcgacttatctcaggtcctgtatcactttagcgcctgctagtgcactcagcaatctccgaacagaccgttatgattcgtacggattctagcggcaggggcaacttagcctgactgggtttagtagcacagccaaggaccctttcatttgggtatcatttttccatagacccttttgggccagctagctatcaaaacagggaaaacgggggaaacagggcccctgtgcaaggcgaatattcctattttctccaacgaagatagaaatatgaaaacaatagcacgagttcactatccaccgtggcatgccaattataggggtcagggccgaacctgccaagggaagttctttcgaaaaaaataaaaataaacgtgaaataccttggataccttggaataccctggatacaaagcacctgcccattcttgtttttccctcctcaaaccctcctctcttctctcttctctcttctcttctccttgtacacagcatctctaatttatccatcatgcgttcctcaattatcttcctttcagctctggctactgctgtcatggctgacaattccactgacacttacaccttccccgctggcttcaatattggtctggtggatagcggcaccctgagtatgtaccccgaccaattctgacacgacgaagcgctaatgaagtaggctcctggtgctctgctcagcgcaacacctgccccgatctttgctcaagtggtaccaagctgaactcttgcgacccggtatgttgttgtgtatcgcgtccatacgaccgggagattaacgctttgaacagaccaccctgaagttcagctgtgtctgcagcgatggttcaaccccaaatgtgacctcctacattcagaccgttcctttctacgtctgccaggctacttacggccagtgcatcaactcgcaccccaacgatgctgagggccagcgcgcctgcaagcaggcatcggccgactgtggctccaagaacgcaagtgcggtgaccaccacctcttctgctgctgcgacttcggccagcgctacgagcactctggcattggccactacgaccgattcttccaccactgccacttcctccgtcgctgctgccagcactaccaccaacgctgctgtggccctcggtgatctgacccagtactccactggtctgatggctggtctcatgttcgttgctgcgcgcatgatcctgtaaagggacgatgttcttcggtctttgggcagttaattaccacttgatggttaggtcgcatagcgtcctctttgttgtattcccttaactcatcgcgttgccatttgctttttttccttcgagacattcgattcccctctgaataggcttgacacattacgatcgtccgcatgtttatgaacgcggcgcctgtcctttcttgttttgctttgggtcggagttcattttttgtctgcgccggtgccgatttcgcgcattaactattcgattcaaagtaatatcaccaattatttccaacccattgggcagcagaatgagagtagtgacgattgcagtgtaaatatttgttatttcacctacataaaatattccaaatcaagtaaaagagtcaaaaggcacacatcagtcgagatgttttgtggtgttcctctcgccaagactttttctggcacacactgaaatttctcaacttatcgatagactccaccatcaagaacttcacgttcgctcttcctctccctttcccacatcaaacatcatgcccgcccctaccaacaccctcctcattgagggttccttcaccgagctcgccgacgagtttgcccagtacatcgatgccctccgcaaagagggtagcctccagtccgagatcgccccgctcctcgaacctctccgccagcaggaacagtctgaaggcgaggccgaccttaagcagcgtgatgaagtcctgaagaagctcgtgtcgtctgcgaccgctctgaacagtgcccccgagaagggtaagtggacaaaaagtgtcaaagaatgatctgcagacagagtcgggaatttggcacttggatctttgatggacaaaaactgacatagattgacataaatgcagagatcacctccgcctacaacctcctgatccacctcgttcaccagtcttccgacaccgacgtgttccttcctcgcatctgcgcctatctcgctaagcccatcaccacctcccctcagttcggccctacgctcgccatctccattctcaccaccatcttcaacactctgtctgccaacgacgcgagccggtaccacgttctcctcgctattgtggccgtgatccgccagtctggatctggaattgccttcgaagccctcaagcctcagctcacttcccagcttcccacatggctctcagcgtgggggttggataacgatgacacccggaagttgcacatcgccattgccgaggcctctaccgctgccggcgatgaggatctggcccagacccacatcgtgcaagcgcttgagaccatcgacccttccgacgccagcaagcccgaagcccgcgaattggctgtgcgcgctctcgctaccgctctgcgtcgctctaccgtcttcgacttcactcccttgaccgcctcagacgccgtgcaggccctgcgctccagcgacagcactctcttcgagttgctcgagatcttcacctcggacaccctcgatgcctacgagaccttcatcgctgccactccgctcgcttccatctctggcggcgtgctcgccgagtccgccgatgccctgcagaccaagatgcgtctcctcactctcacctctctggcatcctccaccctttcgcgctcgcttccctacgccactatcgcctctgctctacgcgttcccgcctccgatgtcgagatgtgggtcatcgacaccattcgtgccggcctcgtcgagggcagactgtcccagctgaagtccgagttccttgtgcaccgtgccacctaccgcgtcttcggcgagaagcagtggtccgaggtccaaggccgcctgatggtctggcgccgttccctcgagagcgttctgaacgtgatccgcaccgagcgtgagcgtttcgcccgcgagggtatccaggccgcggctgaccaagaagccaacgccaatcgcaacggtaacggtgaccgccgacgcattcaactctcgcagccgacgcgtgatgcagccgacgcgtgaggttgaggctagtgccgaatagttgtgtccttttttataaatggaaaagttcacaaaacacaaaaatctttcagttaatagaggggaaatcttgctgtcttttcctcatgcatttcttttccctggccagttgtagggttgggtttttactgcccccgttggatgtttgggaccccacgagtcatgtcatgtcaatcttagtcttgttttatgttttccggagggatgactttccgtttgttcatttttttctattccggcttaaagaatattatatttctttagactggtcatggttcatatccgtagtcaactgacaacttcattggcttcaggttcaagtctaaaaatgctttctatactctatattcaagccgagcagagaaatcacacaactcttccccctaaagggacaccaacactatatacatcgatacaaacacaagaatcccgcttagcgagtgtgcaaaccacgagcctcaataccggccttgacctgctcatagacctgctcaacagagctatcagccttgaccgaaacaaccttattcttcttctcgaaatcatcaacgacaggcatagaagtctcgacgaaagtatggaagcgcttgcgaatagaagccgcgttatcatcatcacggccactagtctcaccacgcttcagcaatctagcctccatgacatcctcagggcaatcaaggaacaacacaagctcggaggggcaaacagtctcctcgaagaaaacagcctggtcaagcttgcgtgggaacccgtcgaccaagaagcgggccttggtgccagccggaggcggcgaggtcgccagcgagtcggccatggcattcgacagtaacgcaacggtgacttgcatcggcacgatcttgccttcgcggatgtactcgcgaatcaggtcgccgtactggctgccttcgcggacttgctcggcgcgcaggaggtcgccggcggacaggtgcacgaagccgtagtctttgacgaggttggcggattgtgtgcccttcccgctgcctgggccgccgaggaagaagacgactgttacgtcgtttgtggagaagcggggggtggccattgtgggtggttggtgcttgtttagttgggagggggggttgaaggagatagggatgaagttaaagggggtttaggactggggttcgagtcgaggttgcttgtggggtgattgtgtcggtgtggcttgactggaaacggacgttagttggctttttccttaaatgtacgctaggccttccggacttacttcaagctagtttggacgtgaggtgcggacgccggtgcgggacttgacgaggtagacgtaggcgccggagctgatggcggttatgatgatgatggggatgattgggaaattggagcggctggattgaggggcggagggtgcgcgtggcggcgaagatctcggaggattcgagtacaggcggtggggtacctgagtcgatcgggtgaatttctggctggtaaggacgagaggcttggagcggactccggagaattgacgggctagagagaacatagagaaagagggaggcttgtggttgttgaggaggtaaaatcaaaaaggagttgggatcgccgaaacgggattagctgatctgtatacctcgatgcggtacgcttcggcttcatggatctgggcagtgatattaggtaatacataatgatgacaactgtttatattcatacatgccaatagattactagatcagtgagctcctcctatatacaagtatatgtcgtacaatggaggaacaaggtgagttgaaattaggtctagaacagtatgaaactcggatccgatccatcaccttagtacttacatagtacggagtagttagttacatatgtgacaccaaggttcagcttttgcatagaacaataacctggtactcatagttcggggctgttcgctattgttaccctaggtagagggtatgtcttgagacaaaatgctctctgtccacgtagtcccaacttttagtaccaccctttttttagcatccggggtagtatcccttcgtttaagatatcttaaacctgtgcagtcttagcggtatactatagttatgattgggttacggacgagcggctgtgccaacccaggtctaagaaacatgccgagatatattttcaggactcaccgcgtatgtacgtctgcactttagtagttaacattgaaagggggattcaccaatgctagagataaattctgacctgtcaatctcatattatcaagtggtttctataaacttgattggtggaatttgacgtcggctagtacgtatattgtggaatcctttgaagtttcgagctacacactaagaatgccggtaatagcataattcggaaagcagccaagtccgcaggaagattttcaacagctataagcgacatatctttctcttctacctcctattattggcagtgtccattattgagcggacatcatccctaatcaatcgtggccagacggtgtttgatgaagtccacaacgtcctgattgtatttccatatgtagccgtggtgtgcggcatttccgtcttcggggtatggtgagcagcattgttcatcaccgtaatcacaatagctgtgcattgagctagtaaatggtccacataaggctgggtttagccgaggaagaagctggtacatctgctttagattataattcagcacttgaatatgagttggtactcacgcctatacccagtgtgcaattgcccacattccacggcataccaggaaagtatgtctcatcaccatacgcaatcgcagctatgactagatatctgatcagactcgtgttttctgacagcctcgacatgacgtactagtcgagttgtaggtccgcgcaagaggggcgatgaagaggactccaacctcactggttccgcacagagaatccatcatgataactgctccctatgtggtagtgagccttggcattttgcatgtttgattgccataatacgatgtcaccattgaatatccaactaccacgatcttagtttgggggcagctttcactgtactcctgcacaaactgctgcatcagaagcgtaccgtcgtgaacagtatataatttgtccaaattagttaagacgtttccatgatcgtagggtaagccgagggttgtcgagccggggatctgcttcaggatcaggtctgaaagagtgctcattacattcagatcatcgcccccgccttgccccctagcgataatagcatgaacgcccgttgcacatttatcctctgacacagactgtgcgtgagtctgtatcaacatcagggtgacagctgacagtacccaaacgatctgtaggatcatattgtacatgttggagaatttgaagccacactcgagatccgacgtcactgatgatatgttgaagaatacgccaccatttgaacttctttgcttgtttttccttccttatgacttcggtgttgaatgaggaaatgcccgaatttgttgaccgttgctttattaaccctccgagcctacgtagtaccgatacatcagagggttttctaggccgcggtctgatgtgttttttatatgtgattggtgttatgttaaattctaattgtaggtgataagatgaaaaccttttctcgtacatattcgagaatgatacggaatgtcgaagtgtctatccatatccattttgaaagtacgatctacagccttggccttccatatctcagcttaattgcagtgcaggctttgcgtctcaccttggctagatattagagctcggatttgacctggagcgcaatcagtcagagttcccggtagtacacccgacgaaccataccggtgctttgggagagtaaaattctagttggaaagtctccaattgcgacaatacatgttttggagagaatattatcgcttgggaaagctggtgggtagcacatcatcctaattaggccatactcggcttaggctctactccatcaagagggcaagaggcaacgctagataacacttgagtgaataactatataggatgcattactatatatatcaagttcaaatcaaactatcttgcagaatatggcctttcagaatctggaacgcctcgagcccgagtttgtgtattcttcaacgggtcttttgctgtcataccgcgcacagaaaggcttcgtgcttcccatgaaccacaggcctcaattatacttgatatgctctgtcgattaggtctcgcacagcatttcccaactctgtgatgatcggaccagaccgaggaatggtgtggccccgtccagtgtcaaacatcgctgcggtatcaggatcacaaatattgaacaaggccaatgcgccgtatcggtaggggtctgtgccgaagataaacagtgagtatatagtttgaaaggggcaatagacgtcaaaattaccatctgcaccaaccacgtgaagcgtcggaatgtccagagtatagtcgctttcatctgccaggaccacgtcttcctcaggggaaagaggaggccagccggtgatgaaaatcgcgcatctgatgcgacgaggacgaccagtctcctgagcctttctatcctcatccaggattagacttgcagccatcgtagcaccctcactatatccgatgatgccgtcgatatcgggattcttctccagtgtatcatagaggtattccatgacttgatggtggtttatccaacggccatcccaaccgttacccaaagctcgcatcacatcttcgggacacgaaccatgcggagattttcgaacgcgagagatcattgagttctctgctactcctccatcctccaaccaccggtaatgcggcccgataccgaaatactccgtgaaccctaggaaaatatgataatcagaactgctttatcagtgtctaagcccaggaggacagtacctgctggtggagacacaagaacaggaccgttgatatagtggaacgaagcgaaaccatccgtggccatctgcttcactaggggatctgcaatattgtcagctggcccttcgagtcctcaaatgtgaatgatattaccaagctgaatattaatattctgtgataagcaagtcagtatggatttccattatggtgtctctgatcacctacgtcgatgttaccaatggcgccatgaagacataagaacctcatcttgtatcagtctgtaatgatctatgggaacgaaaagtaaaatatgggagaggtaacgagcaattatagaaaatatagaaatcaacatatactaggaaataaattaccgctcgggctgtacaagtcgtgtaaagcaaatggaagattgggaaagcacgggatttccgccgagcatcaacttcccaactacaaacaattgggatatcgaataatgtgggacggtacaacatttcagtcaaagtcaccaattcgggaataaccaccgatcacccaatgctagcagagcatcgatcgccttcggagtagagacagctccatgaagctgtacacccccaaaatgacccgtatcagaagagctggtgggtatttgcaaggctatataacacgccataacaacctaggcagtcggtttccccgatttccccgatttccccgatgtcgatgtggctccccaaaattatatagactcgcgtcacagttgcaccttctgcacttttcaccatgacaaacatgaagggtgctgattcggaaggtgcgtcctatggcgaccagggtaccctccaacctatcgccatcatcgggtatgcctgccggctgccggggcaagttacatctcctagtgagctatgggagctatgtacccgagctcgaagtggctggtcacccatccccaaagaccgtttttctgtcgaagcattccatcatcccaattcatccaagattggttccttcaacccaaagggaggctacttccttgacgaggacattgcacagttcgatgctcctttcttcaacctcaccgtgcaggaagctacggccatggaccctcagcagcgcttgttactggagtgcgcgtatgaagctctggagagcgctggcatccccaaagagaattttgctcgccggaacgtgagcgtctttgcgggtggtaatttcgctgattatgagctcaataatgaccgtgataccgagactatccctatgcaccaagctacaggctgtgcggcctcgctgcaatccaaccgtatttcatacttcttcgatctacgaggacccagtgtcacagtggatacagcttgttcttcctcacttgttgctctccactatgcagtacagagcttgcgaagcggggaatccaaggaagcactcgttgctggttgtcaccttaacatcgtaccagatatttgggtttcgatgtccatgtcacagtatgtatttgcgtgtcctccaagccaagttggagatcatatgacctgactgtctggaatcatataggttgtttaatgatgagggtaaaaccttctccttcgacgagagagccacatccggttttgcgcgaggcgagggctctggtgtcgtgattttgaaacccctcgacgccgccttgcgtgacaaagatcccgtacgagctgtcgttgtacattcaggagtcaaccaggatggacgaacacagggaatcacattgccgaatggccaggcccaggaagagctaatccggcaggtctacaaagaggccaacatcaacccggacgaatgcggttttgtggagatgcatggaactggaacaaaggccggtgatcctatcgaagctgcagcagtccatgcagcacttggaaagaatcggactccaagaaacccactttacattggatcagtcaaatccaacattgggcatttggagggagccagtggtataattgccatcatcaaagcagccatgatgcttgatagagagctaatgcttccaaacgccgagttcaagaaagcgaatcctaatattcctatgagcgactggaatatgaaagttttaacgatgacgcggccatggcctcctcgcaagaaatatctcagcgtgtccaattacgggtttggaggaaccaatgcacatgccgtacttgaaaaagcaccactgtcatcaaaagccccagaccgagctgttgaggatgttgaagtggaccccaaacgcaagctgttcttgatctctgccaacgacaaggagtcactacgcactagaatcaaagacttcggtatctacttcgaacagcatcccgaggtttttgaaaagactctgttcggcaactttgcttataccctaggcaacaagatgtctcaactctcataccgtgttggcgtgtcagctacctcgctagatgaacttggtatccgtctcgcccaattgaagatcaacccctctagggttctgggagccccaataatttcgtttgtcttcactggtcaaggggctcaatgggcgcagatgggtgttcctcttatgcatgaatatcctgtctacgagttggccatcaaacgagcagatcaatgcctacgagatctcggcgccgagttctcccttgtcgaagagttggaaaaggacgcaaccgcttccgacattgactcccctcatctaagtcaaccagcgtgcacagcgcttcaaattgcactagtcaacctcctagaatcatggggaatccggcctggttcagtcgttggccacagttctggagaaatcagtgcagcctacgctgcggggatttatgacttagagggagctatggctctggcttactggcgtgggcaaatgacctcgttgcttaagtcctcgttcccgtcccttaaggggactatgattgctattggcacgagccgcgaaactattcagcctatactaaagaacctctctggatatgccaccgttgcttgcgtgaacagtcctaccagcgtgaccgtgtcaggagacatatccacgattagtgaactcgaaaaggttgtcgataataaacaacttttcaaccgaaaattgaagattgacgttgcctatcattccgaccacatgaagaaggtttccaaggcctacttagctgcgattgagaacattaggcacttctcgtcggcgataaccccattcttctcttctgtctttgggcgcttcgcggaaccctttgaacttggtccagaatactggattgcgaacctgacatcaccggttttattctctgatgctcttggcaagatagtggcggacgatgaaacacgacccagccttcttattgaaatcggtccacactccacaatgaaaggccccatcatggatactctaaagagcttgggtcccactgtctccaagattgcatatacaccaactattcttcgtaaagtgaatgcagctgagtccgtcttagataccgctgctgctgcctacgtgcgaggcgctacgctcaatatgacagcagtgaactttcccaagaccggagcggcaaaccggtggttcttgagtaacttgcctcgctacccttggcaacatggaactcggtactggcacgttgcccgtattccacagaagcatatggtcagagatggtgctaggaacgatgtcttgggagtattggcaaattactcaaatgatctggagccaacgtggcggaacatcatccggttagatgaggttccctacctccgggaccacaagatgcaagggatggtcgtttaccccttagcaggctatgtaggtttaatggatgatccgcatatctaaataatgctgactgactgtccaatagttggtgatggccattgaggctgctcgacgacgcgcgaagcaagctgatattcaaatctcccagtttgaactcagggaggtcattgtgggctcagcgtttgtgcttagtgatgagacagatgcagagaccaccattactcttcgcccctacgctgagggtactcgtggatcatccgatctttgggatgagttccgtgtctgctcatggacttcaaagcgaggatggacagagcactgtactggacaggtacgggttcgctccgatccgaaacagcaggcagttgtgatctcgagtccgttcgagactcaagccacttacatgaaagctcaaatttcccgaattcagaaatcggctactaattacctcgatatgtcccacatgtaccaggttcttggtgatctaggagccgggtatggtcctatcttccagaatattgataactgctactccagccctcaccactcgtttggcgatctatacgttagagatacccgcagtgtcatgccgaagggatttgagactcccttaactgtccacccgtcattcctcgatggactgctacattttgcttggccccttcttggccagggcttgggccgaatggatctggacacactttacatgcctacagtaatcaagcgtatgacagtcggtctcaatgtaccaaccaccgctggtgaatacctcaaaggttactgtagtggcagtcccagcttgccttcccctgaaccgaccaaatttgacctttttgccacccaggagggctctactgaacctattattacaatagatggcctggtaatgactcccctcagagattcagacactaaccgtgaagagactcgcaaattgtgctataagattagttggcatcctttggccgaggctgaaaacgccgttgaagaagatattcaagatcgcaacggccccgccgaatctcacggcgatacttatatccacggagacacaaatacgaatgggaatacaaagcaccaaggcaatgcgcacacaaatgagaatcccgtcaagcctaagcacgatctatgcattacgtactttggtaaatccgatggtattgctgataaattgagtattgccctgtccgacgaatccgggtggcaggtttccgtccggaactttggtgaagtgaacttctctcaaaagcaccttgttctacttcagactggagctagctctctgcgatacctcaccgaggatgtattcgaggggctcaagaaggcgctactcaatgctagaactgtgctctgggtctatcggactgattctcccgatgctcaaatgacagtcggcttgactcgtaccttgcgctccgagacctcggctagaatagccactcttgggttggttcctgacatcaaatatcccgagaagcctatccaggcagctatcagtgctctatggcccaccgatggaactcagcccacgaaagatctcgagttcaaggccaagggctcggagctatttgtccaacgcatagtggaagatgattctgccaatagtttcatccacaatgagacccacgacatgacaatctcaacccaaccgttcagtcagcctgggcgccgcttcaagatccagatcggcagtcaaggctcccttgattccctctactttgtagacgacaatcccctaccattaggcgatggccaaattgagcttcaagttaaagcaaacggtcttaacttcaaagacattgtggtctctatgggccatcttgcacagccttatattggaattgaatgcagtggtgttgtctccagtgtaggttcagatgtgaagaatttcaaggtcggtcaaagagtaatggccatgccagagggctgtttctcgacttatgcacgatgcgctgcgactagcgcgacagaaatcccagccgacatgtcattcgaggttgcagccaccgtgccagttgtattctgcactgcatactactctctgtttgacctaggtcatctccaagccggcgagcgggttttaatccacgccggtgctggaggtgtcggtcaagctgccataatgctagcacagatgatcggtgcagacatctttacaacaatcggaagcctcgacaagaaacagttcttaatggcccagtacggtattcccgaagaccgcatcttttatagtcgtgatacatctttcgctcgcagcatccgcagagccaccggcgatgttggtgtggatgtcatcgtcaactccctggcaggcgaacttttgcgcgagacttgggagtgtcttgcacctttcggaaggtttgtcgagatcggcaaggctgatatcacgaagaatactcgccttgacatgcagccctttgagcacaacgtcatattctcgtcggttgatctcaccaaggttggcaagtccaagcctcagctgatgaagcgcatcctgggtgatatatgtcggttgattggtgacgggtcggtgcatcccgtcctaccactttcgatttatcgaatttccgatatcgagaaggcattccgtactctacagatcggcaagagtatgggtaagattgtggtggctcctcatgaaggtgaccaagtcaaggtaaacaaagcacatccgcgattaaatttcagatctaatcgttcatttttcaggctgtggctcccaagaccagtgccactctcttacgacccgatgcatcctacatcttgattggtggtactggtggtctaggccgaagcatggccaagtggatgtcctcgaaaggtgcaaagaacattgttcttgtgtctcgtcaagccgcgattaatgagacggttcgaactttgatagatactttggctcctctaggagtgcgaattatcgtcaaggcttgcgatgtcagcagccgtgagtctgtcaaggctctgattaacgaagagatgaaagaccttcccccaatacgtggtgttattcacggtgcgatggtgcttcgtgtaagattttactatgatgacttatttacattatctgttttcattactgaccctacttaggatatgctcttcgaaaatatgtctcttgaagacttctctgccgtagcgtgcaacaaggtagaaggagcttggaatctgcatcacgcgctgatcaattccccactggatttcttcattgccctctcatcgatagccggcatcatcggcaatcgcggacaggcagcatattccgcagcaaatgcattcctggatggattcatagaataccgcagatcccttggtctttcaggaacatcaatcgacctcgctgcagtcagcgacgtcggctacctagccgataccgacgcccagcggcgacaggaggtaatgaagaatatcagctgtcagaccattgacgagtcggaagtcttggcgttgatagccgccgcgttaaccggtgatcttgatcgatcctgctctgggcagtgtgtcacgggactgggactggattcactcgagaacaacttctgggtccaggatgcgaggttcagcgtgctatatgaggccgccaaggggacgctgggcaacagcgcacagtgcaacggcccgtctgtgccgctgcatgtcaccttgtcgactgccccatctaaaaaagaagccttgagagcgtgctacgaggcgctggctgcgaagttagcgcaggtgcttgttctctccttggaggatatggatccctcgattacagtggtttcattgggtcttgactcgctggtggctattgagattcgtaattggattgcccgtgaggctaatgccaatgtgcaggttctagagttgttgtctagtggcagtttgatggccttggccgagattatcctcaacaaatctcaggcctatactcgcactgagtaagatgatgatagcgtggagtgctgcggcggtatacgagccgttagaaatgatatatatattttacatgttgaatcctgattatttgcagattgttttcatttggaatttgaagccgcatcatttctccatatgttgtactttatataatagtaactataacgacgtacaagatacacagggcaaccgagatgagatgtctaacatcctagtagaaatttgctgctatgtatgcaataagagcccgagaagaataggaatgacaggagtataatagcgccagttcatgtggtattttaggcttgatttcacatataggtgaagtaaagaaaaatgcaccagctcggggaatagacgaaacgaatggataaatcaaacatgcctccatgagtttgagataacatgaaacccattaacaaaaaatgagaggaagaacgaagccgaactccaggaacaaagcgcaagagaaacccattgaaatacccatgtggattccaagaaccagaaacgccttggtgatgctaaacaattcgactgagaaagacaaggaagaagaacgctctctccacaactcccatccgggaatgcccatgcagatgagaaaaaaaaaaggtcacggaaacccatcgcataccatgcgccgacggaccgatggacatggataaaaagaaaatcacaacgaaagagacagctagagatctatgctccacgtaagattcatgtatcactcatatttagtgctgagtggagttcccagcaacggacacagccactgcgactgcggcgccgagaatggcactttcaggcgcagggttgaggcgaatggagcatccggcgcccgggtaggttgcctccgccagctcattcagatagttctggcaggcagcgcggaagccaggatacttgttgatgacagcgccgtcgcaagcgatggaaaggctcttgtccgagtctccgttttcgatgacggtgattgcgggtgattccttatcgagagagtcgacggtggatggggtcgcggggaattccacctcgttgcggaggcaccacatactgtggatggctgtcgccaggtagccagcagcacggcgggagactgtctgggagatgcgacgcaggaatcgcaggtcctcgacggagggttgtttgtggaaggtatgctgcttttgcaggagcgcggcggcggtggaaagggaggcagaggagtcttcctcgaggcaggcgacgatgcttgtgtcgaatgaatagggttcacacatggagtgtggtaactcgccgccgaacaggcgggcactctcggtagcctcgacgatgatcaaacgcacaatctcgcccaggtatcgacctgtaatcatgtactcgagcggctggtagtcgggacgcagatgggcgctgttcagtatgtcatcccaccgtgtcataggcagcacgcctccgccaaacatactcatctctgtattgatcagaacatgcttggcgtggtcgaaccagccctcgggacgcactccaaacttggacattccaatctcgtgcaccgggaagtgaatcgccatgttggtaccggtacccaaaatgagagacatgcgggtcttgggatcgacgtaggcacgcgagagtagagctgccgagctgtcgttcaggatagcggcaacctctacgttcagattgcgcttgcggcatgactggataaggatatcacccagttccttgcctacagtgccattggaggccttgaatcccttacccatggggagcaccaatccgctgctgtgcgaggtctgttcaatggggaaagaccaggacaaccccaccaccagcggtacgtcgccacgcccgtagtctgttccaacttcttgcaggacagtttcaatctgccctgccatccagtcgaaaaattgtgtcccttccagcatcttgagttgttcgtcgatgtataccgatgatactttcaagatgcgcagctcctcatcccggccattcaactcaatcaaagctacgcgaaacgtcgatccgcccacgtccaatgccagatatgtgcccttttccgagccagcgggaagcgcggtatcgtaggatggaagcatgcagcatgggctagtttgtaaacattctcggatctgtgcacgaatcttctcggacatgttgaccatgttgtgtgttgacagcggcgttgagcacgaggtttctacttcttcggcgaagttgtctaggctgcggcgtttccaatgggcgccgaggaaagtctttcggcggcgtcgcgaaaggccacggaagagtgaggggaataggatcatggtttcgagtgcggtgaccacgttatggaacaactcttgcaatcggtgtagcaccttgaccagtggcgccgacatagtcggggaaggaagatggaggagaggcggggtcgcgaaccgggggcgagggatggatgttcactataatgaagtatagaggatcatgaagcaaatgagatagaagaagaaagccctgaagttataacgttaagaaggttggggggggccaagccgatgtgacactcccactggagttgtgtcttgagtggatcggtgggagtgtggacgcaataatccccaccgggagaaagtggaaaggagaaggcagaagagaagagaagagggaaaagaagggtgttgacccaaagcatggatcaacattggcccattcttgagttgacagtgtcaccgcgagtgcaactgtttgggaaaaggaagcccttgcggtgtcgcaatccactgggtatggtactgtaacggtaatttatatgttgtggatagctggggttttatctaggggattgtgcttataccggagtcatattaaaaggcccattaaggaaagctatcttgtgccatttctatccagtctatatatcctaatatcatatatatcacacccgtcgcagctgtagtcggggtggtggagtgaagtggagttacattgtgactatattgtgtattttataggagaaccagaatagtgtaatagtattaatagataagttatactacttcctctacggccgaatatacgcagatagaggaagtatttccaatcattgctaatgtgccaaataatagaatagaatacgagcacaggcattcccaatgtacccatacatactcaatgacccccttgagtgcaacggtggtagtcggctcaactggggggtgggggacggttacatgtggaactaaatcttctacttaactcgcctctcttcttgcattttccccctggaaaacacatcttcagcttattctagcccttttcccccctcttagcaatctgattctgaaacatctatccgatccaataccctaatctaggtattctgctctgcattgcaagcgttgcaaccctatctctcgtcggatatatccgcctacaatcttatatctgtagaattatagtgttatctggcacctggatgtagccaactagattttacccctgtcaccctgttacggcagggggcaaggggnnnnnnnnnnnnnnnnnnnnnnnnnnnnnnnnnnnnnnnnnnnnnnnnnnnnnnnnnnnnnnnnnnnnnnnnnnnnnnnnnnnnnnnnnnnnnnnnnnnnnnnnnnnnnnnnnnnnnnnnnnnnnnnnnnnnnnnnnnnaggggggtcctccctttgagcctcatcaaccacgtagcgtcgacgatgctgtctacggcccgggcgtatcaaccactattgatcacgatgataccttccagagtccaaaataataaaatctccgactttgctggcgacgtttcagtatgctgccatgacatcaccgatggtgcaagtatcacatcatacccatcagtaaagcaagggtaaaaggcaacctggtgatggacaatctctgtggctcctcgtgccatctttaggtctcaacaagattgtgattatgtcagttgaggagatacaggacaagaacggcaaggatatcactgaaggtgactttgtctacaccaagtacagaggcgggtcacatgagggcaaggtaggattcccataacaaatctttcgtttgtgctcaagtcctacggcacaaatgacccgtaagtaggtcgaaatgatcatcagagatcaagctagtgcccaacaagaaggtgtggccagctaccctaaggcaagtcctcagcgagaccagttccccacgtcgtggctaatccgtgcacgttataggtcatctacaccgatcaacatggtcatcgagtcgctcataatccgatcactctaacaaagcaaaacagaagtgcagctgaatgactaagaatgtgtggttggcataaaaggaatacccatggcatagttgacgttgtggggtttcgtagttagggctcctagaacaacaatgagcacaatctcttactatccatgtctataatgttcaaaggctagtatatagattccattcattctagtccttatcaacaatctctttattatatctttgaatctgcagattatcgcagtgtcggatggctccgcgataccctttatgttccaagataatcttgtctacattatctcttcattctttatgtgcctttcagtttccattggtgacatctgattctcattgttctattcatttttctcttgtagtaagatgccggagttggcatatgttttccctggtcatagactaaaaaaaaggtatatcaacgacgtgacagtccatattctttcccgccccacattcagcagcaaattgcaagcccaaaattcaaaagtgcagtactcaatcaagcattttgataaaatatccactcattagtcatgcccgacactattactacccaaccaccaggggaacagcctccaccattgaagtatgacaggcttcaaacgacaggggccctaagggcttcgtggataagagaccccaaccaaatctgtccaattgccccctcgcagctcacaatgcaaaacatggaagaagcaggatggggaatccggcaccaaaaacgacacttcccacccgaccaaatctacgaagaaaccgtcgaactaggtctttccggcgagaagctctaccgcaagatcgtactatggaagtccggagtatcgcctggacagtactgggtgaatgactatatgttacaaacagggccaggcgtaattttcgccatggatagcttccggcctgactccgcatattgggcgcaaattgcgcaggccgtttatcaggatgagcacttcttggaggacctgaagtatgtcttccagtgcaatattattaatcctgagactatgctgtttgtgcagaagagtctctatgtcgcagcgaacggtcttggttggccagatgatagactctatgtctgggaggagaacaccgctgagtatcaggctctactgggtacaaggctcgccaagggtgtcgcgtatttggttctagcggctttcccgcgaggaacgagacgtattgcgaggatcgtgacttggggaggtcgttatataccctacgtacagatgcggtttgatattgagaaggtttgatttgggagatgtgtttgagggttggtagaatttttggcacgaacaatatcatagtaatggaatatagtatttgcccaggtcatcatacaaaggctaaaagttcgtcgattgtaccggggaagacggccattacagatgtccggacttactgtagagctttattctgtggtcccacatctctacttgtgacgcagtgtatccgtgtatggctcactttgaaagatctgcgggcccccggtcccatcatgcatgattatgtcaagagccagcgcccatgcaaggggtttgtacaaagttcaaaacgatcttgtgggtataccccgccagtggacgtagcacacattaaccggaggttgacattaattgagcatgaacgccgcgcacatcgcccaatatatccgagccgttgggccagcgatgcgcggaaggaacttgttcaagttcgaataaattgttgtcgtgactcgtgagcacgtaggcggaatcgcctccgtttgcacgcagtatgcgaataacatactttcccatctctgctagattagagccggtatgcaagtcacccaccccggcgccggacgaaacgaagcttctcccgtgccgtgagagtacggactgatggcgacatactcggcgttcatctgtgcgtcaaagagcaatggcgagattgaagaattaagaaagtcaatatatcatggtactacctagacatcttgaaggtttttatgtaaggagaagaaagcatgtgattttcaacatatcgcgccttccctcttctcgtcctttccttggcacaccgccgtgcaatccgacagccttagagttctccgtctcttttctttctctttgctctctttatactaaccggataccaaaagagagctggaagagaagcaaaagacatcctaaggagaagggatccatacgcgaatgagcacaactggtcatgtcgaggtggtgacccaacctttaccaccagtggatataagtcacctcacaaactttcaatcgacgtatttgaattggtggtaaattcgtttattcagatgaaacatccaccgaggaagcgaaaggaatccatcgacacaacaactcgtcctattgtccatgtgacggactccgggcgagcgaaacagaaaatataacaccgcttcttaaccagtaagactgccaccgtcacactagcatctaggtagggatcaagtactcctatctcacgagtcacgactggaatcgttcgtgttcttctgcgttccacgccaagaccgaacataccatgcggggcatctatgccggctggatctttagcatgtgtgtcagcaggcctgccgccagccctacagccgaaggaactgcttggacctgagggttcgttgcttatgtcgggcgctagttgactagcatgccatggccgaaccacccatgggtacgcgtcgcggagcgctaagataggacgcagagaacagatcgtagtattttcgtgggttgaggtacattttatattccgtagtagactgtaattacttggatagaatctctggtcggagtagcggaattaggagaaacccctgaccagtccatccttatcggcttcggatagaatgccaagacatcccctgaatgatcttctgtcaatcaaatcggtgataatgggcggattcagttgcatggtacttaaggcaaagtagaccgactccgagatgcaggccacgccatcataccagtcttctagcgaccgcagactgaatacatatccacgatgtcggaaataaaatatacgagaggagaagaactccgctgtgggaacgacaaccgacggcgttggcgatgtgataggacaacggcacttgtcagctccactcgacggaaatgccaagacatttcattacgttgctcggcgcggccctctgtctcctctctttggcttctctttggcttctctcggcgggttgttttgatcttaaatttaattaaatggcttttctattctcttgatcctcttatttgcctagcgctgtcgtttgccccccgctctttactcatgccactgacgacgactgtctatatgttgtggtgtctagcggctcttatgtagctttgtcgcgccccatttattctctttttactttcttttattatattcaggaatctacgcttcctagccattctttaacatctaatcatgctttgggcagctgcattactcctgttctcaggtaatgccgttgcagagcgtcatgactcggatttgttgtcgtttgtgacggtgggttgaactttgacattgttggaatcgtgtggttctaatagccaaaatccagcttcctgaggtccgagccttaaaatgggaggttgaataccacgaccgcgagcggttggcccccggttactggttcgttgcgccatatgggaaaatctccccagatcaacccaccctgaaatatcagcaataccaagtcggaccctacatttacgacgacagtggcgtatgtcttgttcccgaaacaaatcaaaaagcaccagctgactcccttctggtaacaggtccttatctgggccggagcacccttgtacgacaatcataatgtcttcgatttcaagccggtgtataacattgacaacgacccttatctgtcgttcatcgtgggctgggaattcgatgattccaagaagggccacggcgcgattgtaaaccaccattacgaggtggaaaaagaggtccaggctctgagtgatgtccacgacttcaacatgcacgaattcaacattatggacggtgggaagactgccctggcttgcacatatcgtgtccagctcatcaatttggctgatttcggacgcccaacggaagagagttatgtcacggttggtgggttcgttgaggtggatatcgaaaccagcaaggttctgttccagtgggattcattcgacaaggttgctctgcacgaatccaacatgttccatgcctcggatcacccagctggatcgcccggttgggattacgtacatatcaatgcggtcgacaagaacaaggccggtgactacctaatctcattgcgcttcacagataccatttacttgatttctggccaggatggaaacatcgtgtggcgcttaggtggacacgaaagcgacttcgagcaggacttcaccttctccaagcagcacgatgtcaagtttgtctcatcgaacggcactcaccacgttatctcattcctaaacaatgcctccgacgaacgtggctctgacgagagggtctcctccgttttgttcattgagctagacacaagtgttgtccctatgacggccaaggtgattaagcgaatcaatcgccccgatagtggcctcacccgactccgtggtagcgctcgcccccttcctaacggcaacgtctttatcgggtggagcgagcgcggttactcgagcgagcacacatcaaacggcgaacttctaatgaccgccaggtttgcatcagaccgatactcaacttaccgctcttacaagggcgagttcactggtcgacccaccgctcctcccgatctagtcgcatccgtctacggtacccacgatgaggatatgacgaccatcattcacgtcagctggaacggcgcgacggacgtcgtccagtggaagttctacgcgcaggcctacgaccgcggccagcccgtgctcatcggcactatcaacaaaaccgacttcgagaccatgttcatcgccgatggctatatggattttgtttccgcggaggccatcgatgccgagggcaatgtcatgcacacttctgagatcatgcgcactcaatctccatccgactggaaagcggctggctgggtcggttctgactctggtcctacttatgatgacccgtcaatcattgtcgctgccaacgctcacacggattcgacggctgagagtaccagcgacgaagcggccgaattgatcaacgacagtacctccaccgtctccggcgatcattcaagcgcccaatacgccgatgcgaaggaggtcgccaaggccgtctacaaggcctacgaggtcatccgcggagtcggcgctctccttatcttcatccttttagctggcactttaggtggaactggattcgccctctggcgacatgtccgcgccggccatttcggccgctaccagcacgtcccctctgaggagggtctccccgtggaagaaatccgtctcacttccaacccgcagtcttgaatgtttgacattttttcgctttcaatcttcattgttagcgctacatcttgccccgtttcgcaattgcaatgtttcgaatcaccaaaccgagcttacaaatttgcaaccacgaggaagcgaaaggaacagaaaaagaaaaaaaaaaaaagagaggttagctgcggccatttggtatacaccattctggtcacgatcgtttcatgcatatcatacccccatctggcgttattttgattgcgttctttctatatatctaccatcaggctgcgcttgagtgacgtttctgcatgcatatctttgattgtttagatcctgttttccttggggacccaagctgacctctgtacattcttcttctcattctatgtaatatcacaacccgagattcatttcgcttgacgaaatccatgtctctgtatataatgtgaacctcgaatttagaacatatcatcccgatgcccccttctttgtccaatttatacgccacagttacataatcgtccacatttgcgacttttctccctcggggcgaacgggaaatgtggcggtggagcagacgatggaaataacattggatcggttcgcccggagttatacaattcaatcagggagaagagtcgataaatgaaacaattagcgcggcatgaggctgacgctgacgacgaaatgttcctaaatcgggaggccgcgtcaccgtttgcactggcgcggatataacggatctatgtggcgttgcgtttaatgcgtagatatttatgccggaatagatagattagattaggtttacagagtggattaaatactttttctctacgaagtagaagaggggatgagacttgctctggtacggagcatgcgaactatatatctcgggcggtcactcactccgaactaccaatccttcaagttgaatgattattctctagtaaatgattttctttgttctcttctgggatttatgagtgattttcttccatatgctagctgtcaagcgcaaagcatgaaaccctaggccctctatatgaagtattatacattgaatatatggaacacagatcaatgaactaaaacctaacaatctgaccctttgcaaacccaagcctagccaaaatacccatttggcatctcgatccaaccaacgaatcctccatagcaggaggcccacaaacaaagaccttcgcatcgccatcggccttcacaacctcccgcaacagcccctcggtaatataccccgtcctgaacccatcactccgtccctccgggtgactgactgcatagacatagtcaaagcgacctgggaagcgcgtcttgaagctctccagctcttctcgcagaagcaggtcctgctcggtattgacgccaaagacaaggttgattttagttttgtcggctggattattgagaataccctgcgctagctggtagattggtgtaatacctgctccgcctgctatgaggtagacctgcggggattggttcggtgtccaggcgtggcctttgagtgccgttgcgaatgtgagggtgtctcctggtgaaagggagtggatgtggctgctcgctttgccgtttgggtatttcttgaccatgagctcgatctggccttcttggtctattgttctcttttgttagtctatcgttatgtcgggcttgggtttattactcgtacttagatcgctgatgggtgtatatgggcgtagtacggggaaccagcgtccttcgggacgggatatggtgaggagtgccgctgcagtatgttagtatataagctgttatagaacgttgatcgtaagtcgggtccatacaagttaatgccaatccgcttgtggccttctgatctggaaactcgaagacgagccgttttgtgttgtgatttacatctttcgtgctttgcaggcgtaaggtagtaaatccgaatcctgaaaagactttgggaggttcatttgactctgcattggcagttgatataagacgcgattggacacagtaagctccgatgcctagtaaagtggcagccgaggctgattttgctgttatggactgggggaaacgagttttgaacatggtgaaaattaaatcttggaattattcattgcattacggctatatcaactgggttaatatagtactctcaaattgaggtggtttacttctaacccgcgcctaaaacccgaggcccgtccaaaacccgcagaacccgtaatgagtcccgaccaccgacatgacaatctatgattctatacccagcagactgggagccccatatgatctacaactgattactccatactcttatatagttcggccttttccggaacccaatgggaagttggggttatatctttagtccaggataaaacgacgccattgaaatcaactcgcagtaattttgccacgtattagaaatttgatcaatttgtttggggcatatttaaatgacttcataatcttgagtagatcaacgaaatagcttcggcgccagcgtcgagcaaaatggatatctgagaggctaacggcgcatgcaaaaaaaagagagaaaagagaaagacaacaaataaaaccaggcaacgatcttatctcgtctccgatgtcctcattctttctgaggaacagcttgagcctgttgtataaagctcgccttgcctgtcacttcgttgtaaatattgtacccatagtcggcagcattaggaggggtatacactaggaagctcgtcaacatttgcttcccatttcgatctcatattcagcacttacagtgaagagagacggcaacttggtcagcactcgggttatgaacacggtgcagcccgatatcatccgagatataagcgacgtcattcatggtatgtctcgtatcagacttgatctccaacggaccacgaagattagagtcctgatctgggacggtgtagatagtctcttgaagcgtcccagctaagatcttcatgatgcagtgtgcattggcgtggtcgtggacgggagagcctttcccggggttccatacaaggaggagctggaaggggttagtctctaattctttctcgttgacagtatctctataggattagaatagaactcacaatatttgctttctggtttatgttctcaatggcattgcgggtataattcttgctggtatcgttgtagaaaaagcgggcccagtcgttcggatcagaggtatatttctgcgccagcgagatcaggtattcattgtccacgtctgccgatgaaataccgccactctcgcctaggtagatcttgatgtcttgtatgagatcatcgaggctgtattgaggtttgtagtgcttgttgcctagtgatgagctggtgccaagcgggagtaagggaatgacagcggacatggtggatgttttgacgttggaaggggatagatattcttggaaggtaatgagaagttatgaagaggattcatggatgagttatatgaattcatatctgtttcccctgtcccccgtgcgatcggatctcaatcggcgattgatccgatgtctcgcattccagcgtcctagaccgattacaatctcgcctgatagtcccaaaggtctgaacatgtgcttctagattagtaggctatgttgaaaaaaaggaggtgctgaaaaaggaggtgctaagaatgatagaatctgtaaaatccgctctattcacaataccctacaagacttgaatagaacttcaaacaatctagatattttttagaccaactctcaatattttgattaaatatctctaatctctctcaaggttccaagttctaatccaaaagaccattgatgggagagaaaactaaacacataacgccataacgagaacatccaacgcaatagctgcagttcaaccacccagtactctcgtgtgatttatgatgtaagagtcgtagcctagcatgcacaccaacgtatcggcgaacaagttaaacatgaagtagatccctatgtcattaactgcgtgaatgtgaatacacagatggttatcacggttatcgccggactctatcacgagagacccaacagaggaatagtcggtgagtattctggccttatctcccgacgtatcattgtgtgagtgaaaagcgcatgagattatacaccgtacaatcggaccttggtttgtagaacgaacacgaactagtcgtcgcacatgatggggtgctatgcgtggctcccgactggaacaccgggtggagttcaacgggccaatcagatatctgagatcggcagcacagtcggcgactcaacgaaaaagcccaatcggcgtttgacatgtctacgacattatcgaaggattcatgtttgaaccccctatcatagctattacgtgtccttggcatttacttaatcaaggccgagatctaatgcgcaaccttctacatgacgaggccagctgacgtttaccccagaaaccgttaggtaaaatgacatcggccgtaataagttctttataactggctcccgggtataaccgatctaattaatatcaaagtcagggatagcgctgaaaaacgaagtgttgtaacaagttggatcgatgaatgcgagggaaaactccggcggcatgaaatcatgtccgtctggcatagctggaggaggattgccactagagctgggtctttcttggtcattaggcgttgtggctgccggggtgggtcgatgtagtggttctgaattccattttcccatcgaatccgataagacttccgctgcagaagatcgaagaacatggtataaggactcggccaatttccatgtccgctgggtgctcttgagacagcctagaatgagtgtgacacggttgcagtgatgatcaaaacactcctcggaatgactggtggacgtggcgagctggataagtccacagagggtcaaggcggggatgctgaagggggtgtgcttcgagacgtttggacaaacagatatggaatcggagatccgcctcgaggcctctgttgctttgatactatggactagacgagtgaatgttgatgagagctcgccagtcaggccaggccaaaagcgatcatctggttgggagtgggacaatacagatggaaggtcacttcggggtaagtgtaggagcatggcggcgtaggctattgtcaaatgcgcttgaaacatcatttcgtcaacgttgccgtatgaatcaacaatgtcgagcttcttgggcggcaggtggttgatccagctcactagtgcattttcgacagcctggagatgatcgcggtgacagtcgcgtaatcggttcaggacaagaacccggcatagtattgtcgtggcctcgatacggtagctgaatgatgaaaagacggtatcctctgctgcgaggatcctccgtttgaactcaatcatcatacgtggttttgggatatcacccgcacaattatatgctgactcttcgcagggcaaggccacctccggtgacacagtgctacatcgaaatgtcgtggttttgagtgggaccgccatgaagatatcggtgacgtatagttcccaccatgttcgtctcatgctttcggcctcaagagatctttcgggatttgtggatgaagcgaatgaccaacggttcatgccaagctccaacgcaatatcaatactatgggagagagcatcttgcgcctcgtcccattcatcacgggcatacagagcaatggagtatagtagccaagcctggaccatggaagctgaccgatcagggtttgtctttaactcagcaacgacttgttctttgtatggctgactcggaatagacgtaatatagtgagagcccacaaaatgcacagttagctgtaagaagtgagggtaattgtggtcgtgatacaaggagctgggcaccaagattggatgggcgacatgaaaattttcataatacaaccgaggcaggcgatcgtcatggagcgacaattttcttgttgaccccacagtttgctgagtaggagcattgtctgaaagcatcactggccaagagaccggctcagtggtaatatcgagccctgcctgcctgcctgcttgcgccgagggattctctggtgtctgtgcaggtgctattggcagaacaggaaccgtagattgatatcgagtctatgattaatttagtaaaaaaaaaaccatcaagtagaatcgtcaggactgacattgacatgggtttgcgggtggcgttggtatggactctcaagtcgtgatttcctgcgtccgccccgtcgggagggtagatattgacagagcaatccattttgaacacaccgcgaacatgatggtttactggcgtcacatttgagatgctgctttctgcattcagtacaggccagtgaggctagaccacttgttttcgttgatctcgttggagtcatgcttagaaatggtagaatgaagggttgacgtttcaatccccggggctatcggcgtttggcgggcggtcggccggggcattccctgtgtacttcgcatgagaattggttaaaatccctaaaatgctatagatatttgatcatttcatatcagaaattatctttccacaagatcaaagggatatttgcgaacagattttttgcgtgtcatttggggactattggaaggaccatcacgtgtcaatagcacttgcctcttccgagacgtgctactgcttcctgcaactactaccggcattgatcaagatatataccagacatcaaggacatcgcattcatataaaggccgttacctacaattcaaatagcccaatcttcataacccttgggaactctccgatttgctcttgatcaagccaatcaaaagttcgttccggctttcttcaacctctttcaagtcgacgtgcgatacccactcattcactctctctttaagaacgtcgacatcttgagaatcgatgtcaaatttatgctggtgcatgtcaaccaaccatgttttgaacgccggccccaggtgatcgatgaaatgattgaagtctccaccacccccaagagtgttggtcatgataggtccattcaaagcccaacgaaggccaaggccagatgtcacggttttgtctaatgatcaagtcagaacacgtcaaaaacattctatcaaacgggtaatactaaccaaggtcttcagctgagacgattcctctcgcgatgaggctataggcttcagcacaaatagcggcttgaagccggttcgcgataaacccgggggtctctttattgacgagcactggatctttgcctaggcttccgtagaactgaagcgcagccgtcacgtacacatgacccgttcctgggtggggaactacctctactaggggcactaggtgtggagggttgaagggatggccgatcagaatacgggctgcgtttctcttgcattcagtgacaaactccgacgaagggatgccggaggacgacgatgcgataatcacgttctccggggtgtttgcgtccaaatgagccaaaagacggcgtttaaagtccagcctctccggtccattcttatgttgaaaggtcgatcagcaccaaccatgaagagacctctttttgcaatggctaactcacttcttgtattagatctaattcaccaagatgaggatcgattttctcgacaaatttgaaattgttcaagtaatcgctttgtgtcaccttgacatcgggtatgcttgaccaatgctttatcaaataatcacggagtttgccctcagctcctggcgccgggtccgtcacaatgaccttcagacccttagccaggaacagtgccgtccaactagagccgatcacaccggttccgatcacaccgacagttttaatggaaggacgagccatgattttagacttgcgaagcgtttatttcgatctcttcgtttgaattgagattctatagaaattggctatgcgtacagtgaggctaataaatagtatatgaacccctcgaggagacagagacggagcaagttactcaagaggaaccggagtcggcatgccgaatcgggaagaaacgcttcccggaaatgcttccgagatttcgaagagtcagccaatattctgcacagtgccgggttccgggacgtccggggtggttctactctgaatgacgaaccttctttaacgaactcccatctatcctcagggaaaacttcgatatttgtctctcgccatttttatcttttcgatctagctgtcactttgggctgctcatgtccaatattagtaatcctacaaagataggtatggattaaaaagttcaaaggttctatctcatctattataaggccgacgaagctcaatgatctgctggggcgaacgacgccccactgttatggagtatggagtacatacagtatgtatgtaccggataatgcctggaacttgaaacctttcccttttcgtttgagggctcacctcttactgctttttgatcaccgagtaaaactgagcacgttcctgggtaccctgacttgatcacgggctattattgcgaagcgaagcaaatataaatcaaaaggtctcacgtacgtgtcacgtggccaagttttctcctaggggggctgaaacaatagcgtttgggaatatagaaccatctttgcactcctagcttttctctttggctctctcccggtgtgtggtcattggaacgctgaggaggtttgctctctgagatttagctatctggcaatttttattgcggtgggactattgggcttgaagggctatgccatttacctggggcgaaagctcgaaaaaggacggatagtcgcgaaaggctcaacttaggtagttctgatctttgcttgtacgctggaatcaatttgacaatgtctaaacttaccactgttttagccctcacagctcaaataggaaagaccggtaacgtaattcacaagcgagccggccaccccaaaacatatagtaaatgcgattaattacaactcgatatatcaacaacagtagtttatatggagatttccttatggattattgctttttaagtcatatctagtatatttagggagttgaggaaaagttgataccttgatggttgcgttgtatatacttctagcttttggcaacgtaattttcggtattttttgaaatcattacagaatagccttctgcttgctttaatattgatatatagtgttagcaaaccttatcgattactatcgagaaataaggagataaaataaaaatatagttgttgagatataaatgtagaatatatcgcatttactatggtgtttgggggtggctggctggcttgtgtggccggctggcttgtgaattacgttaacgtaattcccggccgagctgcgcacccgggcgagctgcgcagcccagaacacatagtaaaagcgataaattacaacatgataattcaacaacggtactttatatgagcttttccttctagtctaatgctttttatctgatatctagccacttattggagtttaaagggatttaataaattgatgactgagatatatatatttccagggttcagcgacgtatttttcgataccgtaataatggaagaactcgatttatccaaaactgatatataatactgtaaatacttatcaattgctatcggtgagtaatgaaattaaataagagcgttagttgttgaaatatcatattgtaatttgtcgcttttactatgtgttttgggctgcgcagctcgcccgggaattacgttagttacgtatagccgttaactttcagcataaggggtttgcacaacttagggcgatcacgtgttttggcacttccggtgccatttctggccttccggccttgggagcttccgagcctcggagatcatatctctcactaattgttgtctgtgacgtacaaggggatataaatacttcgcgactttagagatgtgatgtgaagctgcacgtccagattactttgtccttctctattctaaatcttcaacatcctactgaattcacaatgcctcatccacacaaaaccaccccgagcaccgatatctacggtcctgggagtttcatggatacggagttcactccagttccccaggatactgctcgaatttttgagtatcttgcaaagaacactcctgggttcactcaagacaaagagctttggaatacagtcaagtttaatggtagcgaactaccgatcattcctggtccaatcaaggcccctctcattgcagctgccctacatgccatgtgtggagttgtagcccacgaaattgtcgaaggtcgtgatggcacatcggcacgtacccagcaggtcaccgtcaacaccgatcatgctgctatctggttgggaaatatttttgcggcttccgtcgaagggaaagacgtgcctgaactgttaaggtcgcgtcaactgtcagctcttttcccgcaggatttcgagcacggctgtatgtccacaccgataaaacaacgaactactgctatctacaagacaaagacgccgggggtttcgtatcaacttcacggttctcttgatcccatgccagtcctgcaatccatgggaatggatcctaattaccctgccaagacgttcgatgaagcttatgactacatcagccggcatgtcgagcaatggaccgcagacgagttggaaatgcataacgtcaagaacgggttttgcggcagcatctgctttacaccccaagggtggttagacacgctgatgggaaagacccttgcgagtcacccactagtcggctactctcgacagtcgcatgcaattccgactcctccaattcccttgcctaatatctcggacgataagcggcccctagcaggtatcaaagtgattgagctggttcgcatcattgccggtcctgtcattggctccaccctcgctgctttcggtgccgatgtcattcgcgtgaactgcagccgcttggtagaccttaatgtatgtcgtgaattctggccttcaaacttctttatactgactgataatgtgtataggctttacaacttaccctaaacatagggaaacgcactatcgatattgatctgaccaaggacgaagataaggcacgactgcgggaactcattgagggtgccgatgttttcgttcaaggcttccgccccaatgcaatcgcaagaaagggcttcggcgtcaacgatctcctcgagatggccggaaaccgtggtaaggggatagtgtacgtcgaggagaactgttacggctccgacgggccttaccatgaacgacctggctggcagcagatcggggatgcagcctcaggatcgtcctacgtgatgggccggtctttaggccatacggatggtttgggcattcttccaccgcttccaatctctgatatgaccactggtcttgtgggtgctgtgggggctcttatggctctccgggatcgggctcaacatggtggctcatatcgtgtgacaagctctttggtgaaggcagatgcgatttcactggagcccgagattggtctttactcgccggaggttgttgaacggagcaatcagctgttcaaatgggatcccatcagccctgcctattttgtcgcggagatccttctcatcgtcatggatggatggaagagagttttccctcaatattttgaagaatctggaactgaatcgctcatgaccagtttccaagatgggccatttggccacatgaccaccctgaagcctgtggtccagttgagcgattcgagcatgacaccgcggtggttgacacccgcggttccctactgttatcatcctcaaaacatagaatggctgtaacttgctcctcggaggggtctatcatgtgattctaatagtggtggacagatttggcgattgaaattcgagtgcgagttcatttgccaatacttggggatgatcttgtgatctggagcaggcatgaggattgcaatacaaagtgttcgagtcagttggcagtgaatgtgtgagaggccgataagtttcggttttcatgcctagtttccctcgcccatgtatcttctcccatgcatttttaattctatcactataatacaaagaatattcatgttagggccaagcgtatatagagacaaaggactcgacaacacagataaaataactatattctcatacagggacactctccatggatcagcgcaaatcacaccgtggtctcctactaatctggtagacttcagcccatacgctaaaatatgccagatcaaagatctgaagctgctatgactattacctggtcgtcataaatatactcaaatcttggtatatctaaatttgaacaccatgtgatgcatgcaagagaatcttcagtacttcagtacaatgagcatttactgctggactggtgataaccatcttttagcaacccttctgagtgaaaagaaaggtctgatgttctgcattagtcgaggctatgcttgcattccccatctttcagatggactggtttcgtcgtccaactgtgcaaaaaacaaaggccaatcgttccaatcaaacggataattctcaagccaggccaagtttcctatattattttgaggctcttgtccttccatggttgcgccttgaatcattgtgctgtcatagtcgacttcgtcttgcgaaccttctccggtggcatagtctgctccagagccgcgcatatcgatatgttcttggatcaatttgaggacggaactgcaccgcgaagccaatgtatcatacttttcataatctttgaggatcttacaagcctgttgcaaaaggcccttcaaacgaacgaaagaaaaatgttccactatctgtggggacatttgagctgcaagcagaatggttgtcgccatgtatatatcttataattgttagtggctgacaccgttatgcctcatttacgagagtaactcacatgagacggtgtaccagttcgagggtaatatatacgcttgcgtctgctctggtaaatttctgatgatgaaatctatcatatcctcagcagctttgacacactgaatttggcaccgaaagaccacatatccaatggtttgatcatccgagtacaaattggcaccagaagcattgtctgcctttcgatggcgcatctgtgaaaggaacggcctaaaaaggaggagccgaacagaaagatatctttcaacaaaaattagtccggaattcacattctcgtgtatcaggatacaaaccgggcgcgtaaaatgttcgcttgacgtttcatatgctttgtcggcgtcgggtcttcaaggtccaatggcattcgaaaataagagtgaaggttttcggtccaattgcatagctccgactcgattctaaacaggcttgtgaatttatcgaaggataatggtgagctcaagttcacaccggtgagatttctgcttagatcagggtcggctttggaatcactggagttatagaaggtttctaagacgtcgcctatgatgtgatgtagtcgacagaatgatatgtaaaagttcatattcgaaggcagagttgaattcccagtgtccattgattgtagcaccaaagtatccaatccttgttttgcaacagcttggggaactttgagcgcgcagccaaaagtcatggaagcaatcctatataaaattagcccgcgcattgaaaatatcgactcttcatatcatacctgtccatgataatgcatccattccaaacctgacgggcaaggtcccgttcatgtgggtttttgattgattcaactgtggcaggtaaatgcaagcctagatcttgtgcgatatgaatcgccgtgccaatgcttcggaatgatttctggggctttttgtcgtgttggaaatacaccgctgtaagcaaaaggatttgaatgatttcaaaattgtaaagttccatcagttcataggacattaatccttgggctctctgaaaaaaagcaaccgatgattgatatcgagagagaggtgtttcggcctgggaaactacacaagacatggcaaacatgatattgagaatgcagtgcaaagccctctcgttcatagagatttctccctctttgacccacagagtctcatatgcgttctggatagacgatttgtcaagccaggggtagatattatccacataatcccaatatagactcattaagttgtcagccaccttccttgtaggaagagcaaactgcgtgtcagagggttctctgctagcttcctttttttgcaactttggcaacttttcgagcggtttgggcgaaagtcgacttctttctttccggttattctcagtccctctttttgggcgtgtcgcatttccaacttcatgcaagatatgcgccccgctagatgcgccaaaaagactgccgttagatacgattccgctgtacaagctagcctcatcgttgtcttcattttgagagcagctgtttcgacattcgctcctgtatcttgcctgctcggcgttacaggaggcactgtcgatcgtagccttctctcgggcagtatctgaactgtgtgttgctcaatgcgtaagctgatctgtaggtaatggaccgcgacaagtgagccacaagcaaacatcatgagatgcttggctgctatatattttgaagatgattctattccaagtacttacggcatacttgatgaaggagagactcgatcagcctcccggtatatacatgcttgcgaactttgtttcctttttgagcaaggcccgcatactaccacaacacatatgagcacagtatcgatcgcactcttcgacttcgtcgtttcattctcttacctggtctagcaccatcgcattttgttttcttggctttacaaacgttacatgcgatgctgatcttgcaacgtttcggttttggttctttcgactgttcctgtgaggaagagtcctccatatgaaacgagaacatcattctgcgaccaacgtattcgaaggcagaaccttggaagtgttgaattggcaagtctcgccgttgtttctcggaccgggatttcggcatgtcctattatgtcatcatttgtcccgagttgcgagacacaggcctgtgctgtccaggtctgacctcaaatatgttctcatgaccttgagtgccttcgtaaagcgccgatcgggaaagtcgcgaccgcggcctaaaatccggtatatacagctccaacgtacgattgataatggactccatcagcaagacgtcaggtttcaaccgtctgaatataagcccctctcaaagcttatttggaactgcaatacgagctattttcggcaaagtggcttgaaaatgactgtatatgtaggcttaattgcagatcgtcggcaaatcccgcagaagtgtctcaaatataagctgacacttgcaatataaaaccagatgggttgtcttttcttttgcaattccattcacaattgtcttttactgttgatccggcattctatacatcatggctctctccgcatgtaatgccgtgtcaaacccttcttttgaaaccggcatcctggctccatggcatccatcggccgtgaatgtggcccaagtaagcaatggcacaatcgcatacagtggtgattattacctgtacgaatctccctccctgtccagccaaactacaatatcagatactaacgaagtgatgtgtaccagtaaccttcaaaccgcagtaggaaaccgcggcaacaccatctcccagggcttaagacacctcaagcctcacacggaatacaaattcagtgctcaggctcaggttccatcgccttccggctcagagtactgctcggtctatgtttacgttggccgcaatgcaacagtcggtagcatcgcctcggtacagctgttcaattttggggagtggacggaggtcacagggagctatgtgccaaagagggagaatgagatcttgagtattggcgctgcttgtgattcggaggattcttcttatacggataatgttttgtttgatgacattagcttcattcccaatgattgtgcgtatggtttggcttagaaatttacagaggaagcttttgttgcgcatatatataccgtaccaagaatttctagtttcaaataaaaactcccgctttatatatcctcaatcaagaactttcacggccatcccatcattttgatcactgacgaaaactgtgaagaggatgggaatcgaagataaagaatgtatgctgagaagtatctcactatcgacacagatcctccagcaattccaacatgcgttgctgcaacttcacaagctcggacttggaaattggcgatgaactggttccagttgactcgatctggcttcctggatgtgagccctctgtgttggttgggccatcttgaaccagctccttccgaagcgtaaagaatggaatacccagaccgcgcaattcggccatgatcgcatctgccatttgcacggccgccctatgaacctttgcatcgtaggttgcaatctctgcggcaaactccttttcagtctaatgacaatcagtcagagcgaataattaacataggcaccgagaacataccgagccatcgtcctctttcacaggggcaccgatcgacctccttgtttagcgttagtgatccgtcgctagtaaaataccgcagagcagcatagtgatagactcacaggactgcatctagctctctttgtttctcggggcgacctttctgctgcttcaataatgcctcgcgggcgtggaaccattgttgttcatgatggtgttgacttcggatcacaccgcgaatgcgcgcttgggtctcttcgttttgacctacggtgcgcatcacatgttttagtgctgcgggccaagttgtgatagtcgaagagtcagagtcagatccagaagtagaagtggtggacggtctcgttgtccttggctgcagcggtcgtggatcctccgagggcttggattgagaggatttgatttttggcggttgactaggtgttggtataggctgattagagcaaccctgaccctgagaagctagactagacaaggtgctgaggactgagttcaggtccgaggcattgtaagagccgtctcccatattgaaatagagcctttcgataagatatcgtgggatgtataggttactccgaagtttccaattaatatatcgacactgggtctgaattgatatataaagattgagaatggcgagtgaagatcgatgtagatgtcaaagtgttccaaagacggtcgacgtaggatacatatgcagagcaaggatggagaaggggcgttgagaaagaccagtcaattttggcataaagaataagtggtataatttattgatcacatacaaattacaaattccccaagatgagaggacggaaaggaatgaaagaagataaaagtgatcagttgaagctgttttgaatgtcttggcgcattcccgtgctgaaaatttaccttcaacctgcaaatccccggtttatcaactgcctccagatccatcaccccaccacggccctccaatcgcctccgtccaatttccagtaatatcaatctgattttcaatccctatcttcaactctccccccgaaaccgggaactcccaacatgtcccgatccgccgcagacgcaacgcggttcacggccaccgggccctacgcccactccaagaccggcggcgcgaaccaggcctcagactttgggaagaagaagtccagcgtgaagtcatcaccaaagcaacttggcccgaatggccaaccggagacacccaaggagaaggtggaacgactgcgagcacaggcacgggctgctcggaagacacaggcagctggaagcagtgcggaccgatggattgagtctgggcggaagtttgccaataaagcacacaagggaatggtttactcattgattgccgcgtccggtacgtttcctgccctgtgggatatgagcaaaatactagcaacacaacatacgatcctccgaagtccgagtcagcaatgacaagcaacggacccccagttgatccctactggacttatactaatccttctatgttataataggtgtctgcggtgttcttacagtctactcaatgatttcgcttacgctctataaccgccgccaacgcacgctttggatcgaaaaggaactcaagacccttaaggatgccgagatcgcctacgccaacggtaccgcaaccaccgagcagcaagagctcctgaagaaggagaagatcggtgaaattatgaagcagaagcgcgaggaggagaaggcacagaagccctgggccaaggcgaagcgattcctcttcgagaagctaaacatggaagacagcggtgccaatcctgcaccaacatccgcgtcagccttggctatcgagggtgccgacaagggccaaggtagtgttatggaggccgtgcaggccaagcaagctctcgatagtgctgcggcgaagactggcgctcctttgcccggtcagttggatgtgctggctgagaatgtgggacaggctgcgaagagcaagacatcaagctggactagctggttgacggggcgatagattggggcaacctttggtcctccaagcaaacaaaaagaaagaaggacggactggatgggctggcatgatgccataacctgtcctcggatgcaatgctgatctgatttcatcatctaccagcagacataatctggacccatctctctccctccgccgatcttcactcctcgccatatgcgataccttttctcttgcatggcaagtcgcggttttttttttttaaatcgtggcctgcttccattcttccagggggtttacggcgttttcttccattgtgtttctggaatgtgttcctagtcagtatggtctttcctgacactccgaagggagtgaacggccgggcttccatgtatatcgtgtacagtacatagatctgcttatatctgctctcatttctactctatcctcaggtcccacctaaatagtacctacatatacccccacgaggatacaagcgcccccacgacccgctggtgactcattcctgggcaatgatttcgacctaaataggcccatctaacctaagtttgcgcactaatccccaaatagggacggacccatcctcaacaccggagaagcgcttagccgcgggctaacaagtggagcagaaaaaataaaagatccttggagtacggagtagtacaccccggagaaaaatataaaaagcagattcagcccttgatcacattcctaaactttttggccactcatactatgaaatcgtcaacagtcccagcgaaccgcaaaccccccaaaatgttcttttttgacaccagctacacattcacacatgaattccaagggggtttcccaaggaacaagcaggaaaaaaaaaggtacaaaggaaaccgctgaaaacccgagataaagaaacaacaggtaccgaaacgaggtatctatgccagacccgttctccctcctctccgcggaagaagggctgtgaaaatcagagacaaaaagggcatgatctacagagaaccgaatccctctattgctgcgcttttttggcagcacgacgagcacgaacaccatcggcgagatcctcgagcacctcgaccgtcatctcccagttgatgcaagcatcggtgatgctgacaccgcggaggagaccctcgggtccctcggggggaaccttctggttaccctcgtagatgttggactcgatcatgacaccaatgatggcagtctcgccctcacggagctgttcagagacagccttggcgacgacgggctggttgaggtggttcttgttggagttaccgtgcgagcagtcgaccatgaggacctcgcgcttcttcttggagcggagagcctcacgggcagtgcggatgctgtcgcggtcatagttggtgcccctgtttccaccgcgcaggatgacgaagccgtgctcattgccggaggtcttggtgatagcagccagaccctgcttggtgacaccgaggaagcggtgggggtgcgaggcggcgccgatggcatccacggcaacggtcaggttgccatcggtgccgttcttgtagccgatggggaaggacaggcccgaggcgagctcgcggtgcagctgagactcggtggtgcgggcgccgattgcgccgagcgaaatcaaatccgctaggtactgtggggagatggtatctagcatctctgaggcaatgggcaggcccgtgctcgtcagatcggtgtacagcttacgggacacgcgcagacccttgttgatgttgaaggtctcgtcgatgtcggggtcgttgatcaagcccttccagccgaccgttgtgcggggcttttccaggtaggcgcgcatgatcacgcagagatccttctccagttttacggaaagctccttcagccggcgggcgtactcaagtgcggtgtctgggtcgtggatggagcatggtccgaccacgactagcaggcggtcatcgcgctgctcgatgatctcaattgcttgattccggccggcgcggactgtttcgatggcacgagcgggctatacagacaattgttgtcagttggtgtgcttgtagttttgccatgtcaccgcaaatagcggggtgaaaaaaaatttgtgacttaccgcagggatctcagtctgcaagaagtagggtgacagcaatgggtcgtatccgaggactattaacacaaagatcatcagtatctctcacacgcaaattggctctggacacaattcaacataccacgactgtcctcgttgacttcagtggtcttgatgaggggcatggtgatgctcaaggaacactggtggtgattagtatagattatatagaagattataaacagaagatccccagggccaaaatgcaatttaaagcagaagaaatgactcacaaattcgaggtgtcgaggaggaaagtagtgggactaaaaaaataagaggcaaaagtgggccgagagatttcacgggtcaagggatggttttgagtacttctgtgtactgtgctatttatgggatggttttattagtatttggtcttctcatactcttctcactattggcttccaacatatgtataatgtatccaagctgtactctgtacgggggatgagatctagttgtcttggctggctggagaatatgagacgtccaatcacgggaccggagatgaccacaagttatacatcgcactccggctgacctgcatatcatgtcatgtacttctgatatctgcagcagtcaggagatttccatgcactagtacatggcgagaaaatcaagaattaaacagccagctggcaaactccagtttcatattccgctggactcaactagcagaaaatatggtatatcaaaacattgccttgaagaccacagcctaatcttttccaactttgaatattgaacctccaagccaggatcacgcacacgggctttagctactacagcagtctgtatacaaagtacatttaaatggccgtcgccggttcctcgtaatcttaaattcgcccgactagaaatggctttgacttaacgtctgtaaatgacatgaacgatgaagacctgtcttacaactttgcttcttgaactactcaatttattctcatactgcactatgcacctcaatctctttatttctagacccctctatagacctgctttgagcgttagtagttctatcaatttgcaattattgcctaggcgacctctcctttgatacctcaaccgccaggaacacaacactcaactgtcgcacccacgtcactcttaatccacctataatactctacttcgacatctaaactcatctattttttttttcttaggcttgccttcaaatacttgttctaacgcagattggtttactggcagtattgttctccaatctcgaagtgggacaatctgcagctctttgttctattgcaatgggatatagaattcatgaagacagaccttgattcttgttttgatgttttgaagacttttaattcataatcgtcacaagtggttacctagtcaggtcatatcctctaattttgctgttatgcaccccatgaagtgttgacaaaaaggaggtaactacactctctttcatgtttgcttctcgcacgctgctgggtttgactgtgattgtccttctctctctttctatctgtttacctttgttttcaacttcccctcttgatttttatccttccttttcttctccccccgtcatcttccatcaccttcaattctctgactgtctacacttttcatctctcttcaagcatcttcagccgcgatgcctggcaacgctggaagcaccgttcctttgcgcatcagaatgaagaaaaataagcccaagaaagttgaatctgagatgaccgaattggcccgcgtgcctcgcgcgccacagataccccagaatgagaaatcctaccatgttcaggtaaacactggtcctgacctcggaatcacactggcatagcctgcctcgtctattcgcgcggcacaaatcccatcttctagatactgataattatggccagggaatggtgggctgcgggcacagctcgactgcgcatggtccagccaccaagggaaacggcgaccacatagctgtctctcccgagaagaaggacggaaaggtactcgctactgaccgtcgcttccatgccgaaaacgagtatcccacccgcttcagcttgcaagacatggaaagcgacatcggcaggtggatctgtcttgcttgtcccctttcaacccgcaaatgcaaggactgcaaacagtacgaaggtcacgaagactccctgatcatcgccattcatggagattgtgttaccgacaagaccggaaaacgttcagcaatgggattgttctacggccgcggcaacaccggcaatctctccttgccccttccaggcaaggacgaccacagccacacgacccagatcgccgagttgaccgcctgcctgcgagcattgcgcaatgcgactagcatcatcgaggagcgccacagcatgatgcgcaaaggcaagctcctcatgccgctgaatgccttcgttatcaaaacggactccgagtatctcgtccgcagcttgacggagtggttgcccaagtggaagaacaatggatggaagacttgcaagggcgctccagttgctaatgctgacctgttcaagttgatcgaaactggtatcaacatggttgagttggtcgtccaggttaagttctggctcgtgcccagggcgaacaacttggaggctatttgtctggcaaaggtggctttcatcaaatgatgagccaggggatccatcgatatgtccctcagtagggatatcaattagttatctcaggatctctagtttaatccaaacttctatgatatcaaattcgggaatgtctcgattctcggcttggcttccggttccaaagtgccgaaccgaaatagctgacataagcatccgatgggctcccgatgtcctgtccagttcgaggtgcatgtctatcattaggattattcggtattgtagaatctccggggagaatgtgtagaggctgttagaaatcgacgtacaagactaggaacatcgacttgaatcaacttttctccccacatttcgcgggaaaccgcttagccgatcttcagtgccgcgaccactcagcaacggtagtcgaccaaactacttccgaccccggaattttgtccggcatttgcctataagtaatattggtgtccccgggggagtttggatggagttgttgccggtttctcgcttttctctttcttgcatactttagccattgtacatatgtgagtaacagtccgagctgacattcaattcgaaactgacggcgccgagaaagatcagaaataccttgaccatcggtatacaactttcaactaattccaatccaatcaacctacaaaaccatggcttctccaattccccgcggacttcgccaagtactccagaagtctcccaatgacatcgtcattctctcctcgctgcgcacacccgtcacccgcgccaagaagggtggtttcaaggatgcctacccagaagagctactagccagcgtgctgcaggcaacactgaaggcaaacccgaacctagatcccgcccaggtcgacgatgtgctcatcggctccgtcctgcaagaattaggcggcgccaaagccggccgcatgggtcagatccacgccggcttccctcactccgtgcccttccacacgatcaaccgccagtgctcatccggcctagcagcgatcacaaccattgctaataacattcgcgccggcgccatcaacatcggcgtcggcggcggcatggaatccatgacccgcaactacggctcccgcgccatccccacagtcctctggcccgagctgaaggagtcccactcccaagactcccgcgactgcatcatgcccatgggccttacctctgagaacgtcgcgtcccgctacggcatctcccgcgcagaccaggacgccttcgccgtggagtcccacgcaaaggcctccgccgcgcagaaggcaggccgcttcgactccgagatcgtccccgtcactactaaaaccctggacccggagaaccccgatgcccccgccaaggatgtgaccgtctccaaggatgacggtatccgccacggcctgtccatcgagaaggtgggctcgctcaagcccgctttctcgcctaccggcgccagcaccgccggtaacagttcgcaggtcagcgacggcgctgctgctgctttgttgatgcgacgctctaccgccgaggagctgggtttgtctggtgccattaaggcgcgctgggtcgcgtctgcggtcgcgggctgtgcccccgatgaaatgggcgttggccctgctgttgccatccctaaactactgcaggctgttggtattgaggttcccgaggttggtgtttgggagattaatgaggctttcgcctcgcaggctctctacagcattcgcaagcttggtatcgaccaggctaaggttaaccctaatggtggtgctattgctatcggtcaccccctcggtgctactggtgctcgccaattggctactttgcttcctgagttggagcgcagtggccaggaaatcggtgttattagtatgtgcattggtacaggtatgggtatggcgggcatgtttgtccgggagtaaattgttttacttgctttgcacaaaatgttcttttatatctttcccttcgtagcatgataccagcggtgtatgtgtatttacagtttgcatactatgaatgaatacattgaagaatatttctcattcaacatcaaacgtggcctttttttaaagaaataaaaagagacagactaaatcactacatgcaatttgatgcgtaaaatgattgatttgaattattaaacctcgccttgaggtagtgaggaaaaaatgccaagcatcaatataaccaacacgtgactcgtgcctttcttgaatttgtttctccgtccgggccaactccgccagctcgacgctcataaagaacattcgcgcccacctcgacaatgcggccctcaatgcgcctccctctgcgggaggcaaactttgtctgttccagctgcagaattcagactaccccccgtatctcgccgctcggtcaagtccgccaatatgcctccgactcccccggactcctcgaacgcgctcggcgcaagatttggggcaccgacaagcccccaggcccagcagacccctacactggaagtcagatcatgccaggaactgatctggcttctggagagccggtagcagaggacgcattcagtctcgaacagggtgaagcactgtctgaagaaatcgatgacaacctgacctgggagggaatgcccaggattggttatctaccagagaaagaatggcgtcttcagggttcaaaggggccagctgataaagtcaaaccgtatgtttgatccaagtcatcaattcgatgcttctacatcctggtttgattttctcaatggatttgctgacaatgtccttcttgattgatcgaacagatggtactacaatccacgacctttaccatacatgaaggctgcgcatcaagctgccgtggagattggtctgatgcaaatgttgttggggcagaacgtcaccgttgttagcaacctcaacctcaagaccgaagcacagctcgagtcggttaagatcgaaggccagtctggtaactggggcgaccgtctccgcttccccgatgtcaaaacaatgaatatccttctacgccatgcagcagggagtttgaaaggcaaagacgccaagatcgctcaccggaaattgcaaaagatagctggcgagaagggaaatcgcctgtatgacgcagagtccgagggtcaaatgcagaacagcatcagttccctgtcactggctgatggaaacatcaagtttgttgtacgtattttcccttcgacattctcataaccaacattactgataaccacatctcagttcttcgcccgtctctccaaattgatgtctcagcatattcctgaccacatcatcacctcttccgccaccacgagtgatgtcttccgcgcacaggaggcacttcacaaaaagactactagattgacaccggtgcttctccatcaacttatggacaagaacggtgccgctcaattgcctaacgtcaagattctcgatgttcgccagacccgtcatgaccacgatgaagatcttggccgcaagaagcttattgtctctacgctctacaagaatggtttgatcacaaagagcctgggccagaaacaaccggcccattggaagcaagctaagaagactgaggcgaatgcgtaagcctctccttgtgttttgtagaatgttggaggcatacttttccctttatctgagagcaatcttttgtacattagaattgttgattgaattgcatttttgtcctttgtgagttcagataattggtatgtacggtatatctacctgtcgactcgtccaacataaaacgcaatagtcatcatcaatcatcgaagaacaccaaaagcccttgaacaccggaaataacactccttccatgacttatctcacattgaaaagcaaaggcacttcattcaggcctcacgtctacctgcgcagcaggaagaacacaatcaggtcatgatatagaaaatcctcttgtcatgaaatcacgattcttggacccgccgtccttcttcgtgaagagactgtcgagattctcattcccacccatcatcttccggcgcttcttcttctcattctcctccgccaacacacgggcagtgagcgaagaagtagcggcgttcttgattccattgctagaagcagtattaggcactggtgtggaagtgttgcttcgacttttaggatccgaggattgcttaggtactaccaatccagcaggctctatggtaccgggagcatcagctactccctccgcggaggcgttcttcttgcgcttctttgagccgggggctttcttgagggaatgcgttaggccttgttcagcgagtttatggcctcgcgcaatcagacgttccttatcttcttttttggtggtaaggatgttaatgatattgtcttcgatgtagggttcgttgcactagcacacacacgtcagccactatttccgctttgtatcaaagacatgattcttacctgtaagcacttgtcgcctttgagctgtcggatagcctcctctgcaaatacatgtccacacggcaccaggtacacagacttcacactcgggcccaacggcttggcggtgaccgggcagatccagccctcgcgacgctcacggggcgcataagcacggcctgaggggtgctcggggagctcagtgtcgatttcgaacttcatctcaaccacatcccggagcgacttcactcgcccgcatagaatctcctcgcagtctgccttagagctgatcccctcgacatcgtcgccgggaagcaggaactggagaatggcgtccttgttataaagatttccgactgagtctgatacaattggccgagagagggacttgtgtgagagcgggcaagtagtccaggagtgctcttgctgctcgcgctgagtctcttttacttgcgccgtgctcggggcacgggctgcctcgcgaacgagctcgcggcgagtcggaatactaaaaagctttgtgttagaatttttgagtctatggcacatttataatagagtcgcttacctgccaccatcattacccatatttgcgatgcggttgtaaaatgcccccgacttcgccacgataaagttggaaagatagcgcgctgactcagcagcgattagatccagggcccgctatcaacagctggccagaagctctctccgcaactcgacaaacaaagctcaatgcctcaagcatgagacttcctcagtcgttattcttgctggctgccgctgggtcggcggtccaggctagtagtgacaagcctgcccgtccccgtggcttgggcccagaatgtgagtatctgaaccctgactttctagatccattatttgcattattgtttgcggctggttcatgtagcagtgatctatgataggcaattgatcctcttatattagagattacactaatatagtatccttagttgccaaattctaccaggactcaacgacattcacctgtatctcgaatccctcggtcaaaatccccttctcggccgtcaacgatgactactgtgactgccccgacggaagcgacgagcctggcacgtctgcctgcgcacatatttcgcgcaattcgccactaacggtggccgaccggcctgggaatagcgaattagacaccgtactcgctcttccgggattctactgcaaaaacaagggccaccggccatcataccttccattccagcgtatcaacgatggtatctgtgattatgaggagtgttgtgatggtagcgatgagtgggctcgcgttggaggcaccaaatgtgaagaccgatgcaaggagattggcaagcaatggcggaagcaggaggaacagaaccaaaagtcgatgaatgctgccctgaggaagaagaaggaccttcttgttgatgctggtcgccagcagcaggagctcgaggaccatattgctgcgctcgaggccgaggttcagggtgctgagctcaaggaacagaacctcgaggctgatctgaagctcgcccaggagcaggaccgcaaggtggttcgtactggaaatggcaaaggtaatggcaaggtcaatgcccttgcaaacttggccaagggccgtgttgacgagctacgcaatgcgttggtcgatgtgcgtcggcagcgggatgaagtccgcgagcgggtgaaggagcttgaggatattctggctaaggtcaaggtggaatataaccccaatttcaatgacgagggtgtcaaacgtgcggtccgtagctatgaggactacgctgctcgtgagcaaggcaccgagggtgtgaacgctgccgtcgaccgtgacttagacgagattgccaaagccgacggtgaagaacatggtattaactgggaacactgggaaaacgaggaggatggatgcaacgactcggatttaggtaagatattccgtgattccttgtgacaccttgtatagcttaccaacaggaactatagtgtacaagctcgctgcttatctcccaccctcgcttgtcagcttcattgaggatagggccgtttctgttaggagctaccttgaagaaaagggcattcttcccaaggccgataaagactcttcctcggaatccaaggccgtgacccaagcacgcgatgcccttaaggccgcgcaagatactgttacaagcatcaagaacaagctccgcgaccaccgtgccgaccttgagcaggactatggccctaactccatcttccgcgcgctcaagggggtatgtatcacccaggatgcgggtgagtacacgtacgagcattgcttccttgagtcgaccaagcagaaccagagaaagggaagcaattctgtgtcgatgggcaaattctcgaatgttggaactacgaccgtagaagaggtcaacgcggctggcgaggtcgtcaatgtcgagaagatgacgattcaatacaataacggccagtcttgttggaatggacctaaccggtcgaccaaggtcattttagagtgcggtgaggagaacaagatcttgaagacggcggaagaggagaagtgcgtgtatgccatgcttgttacctcgccggctgcatgtgcaagtggtgaggaagcaggtaatgttgcgcctcgctcgaaagacgagctgtgacggctatagatctagagatctggtgttacatatgtattgaatgtttatttcacgtgcatctcattcattagaatgaattgcaattcgagcgctttttacccttgtattcttgttccttggtgttaaagtgaacatctgtttctcggtgatcggggttcgattcaatcgacgtatgtcaaagacatctgcatagccctaaactatgagcatagtcgaaacacatgtattggagcatacagatactactaaaggtcatgaatcacacaatataacatcttcatagttgactaaaaattaaatcacaagaacacacacaaggtcaaatccgaacctataaacttaacacctcatccacaaggccccaggccctattatccccagatcctagcatacaatcatctcggtcatgaacgatcacaatggagttatctcataactcgacgaaacaatgagctagtttgacagcagtggaagcccgggtctagtgtgggttgtatgggaggaagatggcggtgatgaaggccggtgggttggcttagtgctaggagggtagttagtatatcttttgccctagggccgcatcccactatgagtgaccgttataagacagggagtgagcacgcaggtacataccttgcagctagagcaggagcaagaagtgcactcgccggagcagcagttgcaggtgcaaggagacatgatgaagatagagttggtaggtaaagaaccttgaaaaagaagcttaagagtaatgtttggtttggatgtagacggcttggatagagaaagaaaagtctaacaggggacggatatgagcccagctttatagattcacgactgctacggagtaaattatcccgatcaataatagcgcgcataattctatttcctcgtccatcatgctccctccaatctaagacgctgtaatgtcgccgcgacccgttcacactccatagtatcgcgtggtcgagtcaaatgagcccagccctgcatcccactcaacccgcctgcctatcatgttcttcaagctattctcacgcgctatgcgctgtaaaaagaatactctggccagatgctcaaccgctcgccaagcctatcaggttctacctatgatgtaaacttttacagtccgcccgccctcgggcgaatatggcgcaaaagccggtgagtagattagtatccgatctattttcttgcgaagtctaagtgttatctttctcggtgttttctcgatagtataatgggtacaacatgaccgggttaatcaggctatgtacggagtagctcagattgcgttgtgctcgggccgggttcctgcgaagaatatagctgatccattggcttaggctgaagactaagaatcttgcaggggttcgttttgtggagcaatggtctgcattgtttacgttgcttacacttccagatacggacatcgttgcctatacatgtgtaagttgtttcctttgaacgtcgactactagacttggatatgtttcattgatcatatgttatgctatgtggagggatatgtttctaagacaatatagtgaggtgaataatatatgggataatgtggcagcacaaaacactccctattagtgcgatattaaaatccaacccttctactatcatgccacaatgacggccacgtttcgggcacgacgtagatctgcatgcctcggtccactggtttcgggacgggcctgttattatctcatgagtacagtcataactatgtacaacatgcgtaccatgatgtggagtgtaagtactagaacgaattaggataaacgtcgtattcaaaggaaaaacggagaatacacagcaagtaaaggccgagtgtgtaatttcccgcgcctacagcggtttcaggctgggctattgtcgtggcagcctatgaggcgaagtttgctcggattggggaccttggaggaggggtgctacctggcctcattggcagccctggattacctgagatatgtccatatccacacagtggagcatgccagggtgttctggctgtgtttttagttgtttttattgattgctttcggggtatttgtgtactagaggtgtatgagcggcaagacgccctaggagctgcacctgcattgttggggttggattagctgttagctcccgagatcaggttgaggccggcattagatcatatccatatatattgtacatagttgtactatgcaaagaaaagaaaccgtgcataccaagagacaaggtcgttgaggcatctcactctgtacaatgtagtccgtacgtgacttcaaaacgccgacattgcgcgtttgggcctcctgcggggacagactcattgggatctgactgagaaccaggagcaaaccagccagacaccgatagagtggagaggctgcatattggaagatatcacagaccccttcgaggtgcatcatgcatgattatgataggctccgattcgatactgctcttctgggactcgtgcagcatcgagtcccgcttttaatctcttcttgcaatcagctctgcggggtaccaggtgttggggtctttgttgtagaaaggtttgatgttggagatgggtgaaaatgccgcatcggcaagaaatagccgcagaagccggtcttgaaaggctgtgaagaatatttccgtttcggggcactgagacgatgggatgatcaagacgataggatgatcaaggcaataggatgatcaaggcaataggatgatcaaggcaataggatgatcaaggcaataggatgatccctcggtggactatgcggttaggttggaaataatgcctgatattatgtcagggttcgtatcaaacaagattcttgtggctcgtacagctccttcctccgtaagggtatgtgtcctcctcccagactatatttctttatcgaaatggatgatttgatctgagttatgtactgagatattcctcagaggctatgtatgtcgtcaaaatacggtagctgtccttagttttctccacttaggaggctgttcgggtatctaggtatgtcggacaggccgtttagctcccaaggttgatctaaatgacccaagtttaggatctgatgcccacaaggtccttgatttacaaagaataaaagtggtcgagcagccgcatgtcattcactatggagttatgccatgacacgtatccctgaggaacaccaccgggagctacccaactcaaatatcctccgtctcacttcgacttccgtgctcatattccttgaaagattcgaaccatcatgcccatatgggtgatttatttcttctgaacgggggtcgggtcagctagacgtcatggaaggaagaatgagggcatatcacgtacggggcagttgcaggcgccggcagggcactggcaagaggagccgcagctgcatccgtgatcgcctatcatggtggtcagcattgaaggaaaaaaaatatggtgaagtacgatgagtgacaaccccgctatgaccccaccatttcggagatcaggcgcaaagcgcggttcttcacagatttctgaagtgacatataacatggaagatgaaagtgcttactcattttgtatgtttggggtggtaaaaactggtgaagcttttgaagttgtgttggttgtaaaggcgaggtgggggagagaagggaagaaggatggggccgggatcttatatactcgtgactttccgggatacgtcgagtctgagggtcaggcacctgagtgaattctcattcgcatctcgatccacgttacacttgagggcatatttctgtccccgcttacgcacatagccaacgcattgctttcgagagagtttgcgatcagattattccctcaaaccatgactactactcctatcgcttgcatctgcggaagcgtatctttatctatccagctagactctctcaccgaccattctaaactccaattatgccattgcaaccgctgtcggctggtgactgggcagttatcttcatcgtattatctcctccagcatgaaccacccaatctagatggcctccaggaataccaacagtccgaccacgtgagccactttttctgtaagacatgcggtgcccacgtcttcgctcgtatgcaccctgggggtcagtttctagttgcctccggcttgttagcaaagaatgttcccttggtccgagcggttgagcactggcaaagcagcgatactggtgacggtggactcagcgcactgcttcctagaacggagtctcctgtcacaggttgcagattacatatttcaaccaatatcgaaagccctaaccgagaatccacaaacccagcagaatatatatcaaccagccagcatttgcgggcacgttgcctctgtggaggggttgagttttatatcactaagcccgatgcatcgtccttacaagcctcctcgccatggccagatctcctggttccatactataccgggtctggggcaaatcctggcgatatcaaatggtggttgcgaagtggtggtacaaaatatattgcaggagcctgtgtttgcactagttgtcgactgagcagtggatttcccatccagacctgggcatttgttcccaaatccaacatctttaatgcagacggttcaccacttatgttcaatgtcgggaccatgcagcggcatagaagttcatctggggtatacagggaattctgcagccgctgtggggctactgccttttggcattgtgatgaacgaccactgctaattgatgtgagtgtgggcttgctccaggcacatggtgctagagctgaggactggttagaatgggtaacaaatcgtatcagctttgctgagatggcggtgcaacatgatttgattcatattctagaggatggcctcgagatacattcaaagcagaagtagagtcaatatccggacaaaaacctatgaatgccatcttagcaaccgtcttcacctaggtagtcataaagaagggaggttataggtatgcttcaagaaggcggtgatacatgcggtcgggcaattatgtctgttggcctgtttccttgtctgtacacgtggaaggtgcgaccaactccgtcaccgccttccctctgcctgactttttcggatatcttttttcgcgcgtcgaaactcgaaacacctgattctctttcctccacgcgtctgcatttttgctgcttaactgcagctgttcaaaatgccaatgccttcagttgctccgttccagttcaaaggaaattctaattatcgtggctcgcgtcctaatccacgacatgagttcactttccggtaccagaaacccgccacgtcggaccgaccattgttgtcttcgaagagggaaagcacaccggaacggcttgagggcgaaactaagcctgaactcaaatttgccgagctttctactttaagcgacagcgaagaggcagaaatggacatgtctgatgacgatgccgagcgaccacgcaagagacgtgcgctaggtgtcgatgggtccccagaaaccgctccggcacctgctgcccccaaatggtcgaaccccgatccttacactgtgctacctcctccggccgaaactacaaacaagagggtggatgttgtcaagctgattcgcaaggcgagacttgaagttgtcgcaaagacggacgagacggatgcagtcaagcagaactcagacttcatttctctcggcatggatttcgaaccagaagtttctcagagcaacgctcctgaaaacgcccccagagggccaaaggctcaggaaggtctagatcccgccattacgagtcggaagcgaacccgtgacgatgagctcaaaggattctcccgaaagaccggaaagcctgccagcaggttcaactacgatggttccgttattgatcaatggaaaccactttcccaagagacaggcacgccttggttcgagggcaccccagcatccttgcacgtgggaacccagtcagtactatcctttgcgctctttctcttttctctctaacatctaagctaggctgcataatgagattctcagcttctatcactgggccaagccacaggaattcgaacacatcgtccgtgcagatcttgtcaatcgattggagactgcattccaacaacgataccacaacgtttcaatccgggcctttggctcttttgcctcgggtctctatctccccacggctgatatcgatctggtgctgctctctcatacgttcttacgcacgggggttcgcacattcggggagaggaagggtcaaatttacgcgttttcggctttcctcaagagcacaaatctggccgttcctaactcgatcgaatgcattgcgtccgcccgggtaccgattctcaagtacgtggacaagctgaccggattacgagtggatttgtctttcgacaatgacagtggcttgattgccaacgagacattccagaaatggaaaacccaatatcccatgatgccagttctcctggccgtgattaagcagttcttgttgatccgcggcctcaatgaagtcccgaccggtggaataggaggtttcgctatcacttgcttggtgacgaatattctccagcatctgccccagggccatatgcagcctaacctaggaaccatcttgcttgatttcttgaatttctacgggaagcaattctcttataccacgatagcagtccggatggaccctccaggctatttcaccaaggtaagtggattttggttcgcattactgttgactagccagctgataatgtcaaacagcaatacttcggccaccccgatcgtctcacaatcgaagaccccaacaaccgagataacgacatctcaggtggcacgaaggaaattgggttgatcttgcgagcattttctaatgcccatactgccctaaagaatcgcatggaatatctagcacttgtccaaggatcgaacaagagcattcttgagcccatcattgcggcgaactttgatgaatatgtcgagcaacgcttccaactccgtcaggtgttcatggcagaggataggtttgctcgatacaggaagtcttcgcctccgcctccgccgccgggatcccctcctgctaatggagcatccccccctcctccccctcctatcgacggagccccctcttctttgccggcaccccaagctcgcaaacctgctaaaagactcaaggcaaagttgaagggcacaaaatcggagccagaagatatttcttcggatgacgcacccgggcccgaagcaaagtctgccaaagctcggaagggtgagacaagacgtcagttgtgtcaagagcgtgcggccagactcaaacgcctgaggcccgacctcaagaaacttcccaataccctcagcctccgccaagctcgccgccatgcaggctatgagaccgatgagcagatgaatgcggacttggatagcagagagcagaaacttctcgcctcggcataaatttgagtctccacttccacgcccgcaacgactttcttttggtttctgtttgtatgctttattttgtatgatgataccccttacttcgaatggtttggtgatttggtgatttgcacggggaagagaggagggatgtcagtggcggtatggtggggaaggtgatatgttcgtgtgtgctttggcaaacctgtatgcttattcttctcgttggcgagaagcgcagccaatgaccgcggagatcgagaatgagcattcttctttgggcctgagacgaaaaagtacttactatttaggattctctcccggacttcgacctcgccagattctgttgacttgtccctcggttgcaattgattagagctgtcctgatgttgaattcagttttcgatcttatttgattgagaactagtttgaatatggataagccttgacaatctcaaaccctggatgcccttgtttcatcatctattcgagtcgatccggcgccccaaacgtctaatgttctctcgggtttccctcgacgagtaactagttcttgcagttcttcggtccctacacgggatgctgttagtgatttcaatgaaacccccccgatgattatggattcgcgcccaacgtggatctatgtttgtcggcgtttatctttcttgcttttccctttgccctctccttctcatgccttccttctcacccagaaagcgctagatgcgacttcttggagaggaatagagcatcaggagctaccgggctcgggagcgcaggagcgcaggtcgaacttgcctttttgcaatcggaaggtgggcccatcccacgtgttgccgagtcccttcgtgcctgcaacttttcgtctttacccagaattatggaattacatattggagttacgaggaaacattgggagacgccgtaatggctgtatctcgatctattgcatttatcaggttctatctctgatcctatgcaagctgcttttccacgtctgacggtggtgtcagcataggatccgcctcaatagcggtatcggatatagagagagatggcttccgtccccttctctcctcggcctcgatcctctgcacagcagcaatatgctcctcggataacgaattcacaaagtctggcgatggactggcccagacataatcaacccactctgtgcctaagatatcttgaatttctcgtgccagctgcaagatatgaactccacgcgtacgagaccaagcacggtccgtgataaggtcctgctggggcgtgagtatattcgacgccgtgggcacatcccccgtcgggacctccaagctaggggtaaatggtccaggcgatttcaacttagcatcgaaatacgaggcgtcgtcatcctcattcaaattctcgagcccatcgacgatactgtgccacacgcgcaaagtctcctccagctcagcaatattactaacgcccataacgctgacgcctagccttctccccgtgcccaaattggccacagacaagaacccaggatcggcgtccgcagcccgagcaagcggcgcaccgagaccgccagcccgcgcaccaacacgcagccacgcctccagcgcaaaccgaatcgcaacaacctcaagcttctctccgtggcgcgaagcacaatccgcggcaatacggatagccttccgcagagcttcaggggcgggatggaaatcgcccatcgagccaataggcacgccgtcgcgacgaagcaatcccatccccagcggcgatgcgttcggaacgacatcaacgccagcagcaagtagcctgggtagggcatgcgagtgcagccgcgtattctgcagagtgaagttggcgtacgacatgacgatatcgagcggctcacccgtctcgcggagaaccgtctcggccagatcgctgagcgtgtcgaccgggtagccagagataccgacgtagcgtatcaccccctcttcatcgcggagacggcgcagctcctgcaccgcgacgacaacttccgcagccgtcacgaactccacgtcgtggcagtacactacgtccaggtagtctgtgtgtaggcgttgcaggctgcgtcgcacgctgtgtctaatccattgaggcgagtagtcgaatgaggagccggctatgcgcccgactttagtgaggaggtggtatgtctcccgtgggaagttggcttgcacggtttctgttgcgagggcgcggccgaggagttcttctgcggggccgtaatagggggatgtgtcgaaggcgcgcacaccgcgcgataatgcgcgctggacgagttctgttgttggaagcgcgtaagggtcggcattgtattgggagttaaaggttgcggtgcccattatcagcggaggcagcgccgcggacagtggggtggaggggcgcatggtgtgggttgggaggccaatttcgtcaatgccgaggggctggctatggaggcttgggtattgaagattggtcaattggtgagagtcttttcaaattgtaagtgtatcgactatattttctccagaaaaaaaaggaaccccccttcggctccgcttcggatggcgcaatggcgggggattccccccgaatcgggacatatggccacgatccgatcgatcggctttgcgttacatctactctttcgaaggtttcggttgcgtggattgaatgtccccttgatagaagtaggcagtgacaacgtgaaaatgtttctggcaaggcggcggtggcaaaaagggacaaaaaagtcaatgtagatcccgacaactacgatgcatgtatatgaatcaacaaatctagatcggacattacacacaagttaatgcaagtatatagctattgtacatgaatcctttccgagtgagagtggagaaaaggtcaacggaacgcggcgcatcacaaatgatatacatagaccgaaaggtcgatgagaaggtcggacatgaacaccttcatatccgaccggagatgacgcccgaggaaatccgggggccatcttaagacatcacagagaaagaccccaatctagaaaatcaaggcgtctttctctaacaacccaaacgccatgctatgccaaaaaaacgaaagacgagcagatcgaaaacaaagaagccggttggggccggaggcttctctcgcaggaagtatagatgtgctcgtagaaaagccgggggcccggggaaccggagaacgacgcttattgttgtgttcaattatctttgtagaccttggggttccatccttccttcaattccttgtcgtgcgcggctttgcgctcgacctcgcggaactccatttccagacgctcgcgtgcacgcagaatcttactttgcagatagaaactgccgcctttctcgggattgttcgtatcgaacagtttcttgaaccgagtcatgacatgttcgaggtcgtgttcgccggacgccgggggcttgacgttcaggattttgcaggcttcatcgatggtcacgctcgaggtggtagtagattttccggctgccttttgctgcccagcgtattttccggacgcctgggcttgtttgtaggcttcggcgaaggcgcggccgaagacccgggctccggtcacgacaacttgagagacgatgcggtgagcctagtagtttgttagatttaattttaagaatgggaagaataatgagatgaatgaacataccattgagaaagtgccgtggaggaggcgatcgcgatgttataggttgaagaaggaaagatgagaaggggaaaatttcggctgcgggttttagcgtccggagctccaggcacgggcatgagtatagggaacggtagtatagctagcgaggtcattctaattcgagattgaagattaaaaatgaagtatttattatttactatcatctacatagacatccattctaaaaaagattaaaaattagaacaaaaaatagaaatcaaaatccttcacaccgtatacgagagtcacatgtccacaagttcgatctccccgcagatcttcttagaccgaacatgatcctcactcatcctagacgatgagctcattgtcactctatgacctgtccataattggatggcagctttaggtatgctatttgatcatacctagccttaaacacggtccctgatgaaaaagaaaacagacaaccttccgtggatagactccatgtcgccctcatcgaacacccaagatcatggccagtcggactctcaaccgccgacggtcgctgccttctctccgtcgacgattaccggctcggctctgacctcgcgccagcgctccagtgtcatcgtacatcgaaaatcacctctcctagtggccacaccgccagctatcactcgagccttggcatactcgcacccgttcatacttcctctaaataaatttgttggtatcctgacatggacttctggagacccgtggcagagttttctgctggtatctaccttttggactatcgtgctatatggcgatactatcattctttgggcaggaccgatcctggtcgtggtcacgttgatcctcggcatgtatggacgtcgttactcgcctctgtcgtcaactgcatcaacaggcgaaaagcacaagaccaaggttgccccagatagctcactgcgtcatcagaagagtcttgatgaaatcgttgaaaccctccgtatcttcacaaccagatgcaatattctcctcgaacctctactcgacctcaccgacttcctatccacccaacgtactcccacatcggcgactacaaaacctgcgctgacagctctgttcatccgtatcctcttagtcacccctgtctggatcggtctgactctacctccattctacatactcaccacacgccgcgtcgtcatgaccgtcggcactattgttttgacctaccattcccgacccgccagggtgtcgcgtgtcattttgtggcggtctagagccgtgcgtcggctgtgtgccgcagctacgggcctctccgtcaccgataccccgagcagtccacaaaaggccccagctcaagccgaaggcgaaaagcaaggcttaaacatttcaacgcggcggcgtggaaacaatgccggtgtgcggttcacgtttgttgtctatgagaatcagcgccgctggctgggtatcgggtggacttactcgttgttccccgcagaacgtgatgcctggacagacgaacacatgaacgcagtgaatcccaaggattcctttgagttaccagaagttcaaacaggagatgccaaatggcgctgggtggagggaagtgaatggcgcatcgaaggagcggacaactttaatggaaaatcggactcgaaggggtcaaccggcgaaggatggatctactatgataacaaggttggtgctttctctctataccttttgtttattatcttctaacggaactctagtggaatgacggtcgccgcggtcaagacggatgggatcgctatacccgtcgacgcaagtggtaccgtgacgctgaattggcggacctatcacctcaagacacccagagttcctccgcagaaaccacttccgggctcacgcgggcactcgaaaaggagaaagaacagacgaacgacgacaacgccgacgcacaaagcatcgcgccatccacctcctccaaatctcaacgtcggcgctggttcagcggtacctatgacaaggaaatgacttcccctagcgggccgcccgctgacagtgggcgtgcaaatgcctcgcgacccatcagcatcaaaaatgcccgtaaattgtctcatgcccgcgaaggaagtgtgacaactagtgacagcgccagtttgcgcgagaaggagatagcgaattcgcaagatcatctcgaccggtggtcaactcgagctgcgggcgggacggaaagggccgaaagggaatgggggctgagcgatgaggtgaacatggggttgagttgatcgtgcgttctacactcatgtatgccatcatccttgctcgaattccgccattttctacctaaggcatggccttatatatccttatatattcttattgttctttgagcgtaaacggcggaattgtgaattgccttgtcaagttatatctttttgccccaatacgtaaacggtaatggacggaggacggagtagaggtgaggctatcgcaaggcttataggagcagtggacggtcaaaatttcacattccctcagattcaaggtgtgaaacgagggcaaggccactcatttagtataattaatgcaagatatgtacatcttgtctaatattaacaggattcaggaatagaggcacctccaagatccacgtccgggtctgttgcaaattccaactcaagagcaaaaaaccttgttcagatcgcataacggaattctgagttctcacggtctgttaggtccaaaaactcgtggttttccggaacgacgtaagcatcacccaatgcctccctctccttgtcgcgtcggcgattctcccgttgcgatatccaccagataatgcacaagtcgagcgtgacgatgaaatacaggatgcagatagagattttggccggcaaataccctggggcatctttggcttggaaggtctgtggcgagatgatgttgccgacagtataggcgatcgtctggatgcaggacacggtgatcttcttagttgagccagccacattggtactggtgagcccaagaatcgtcgtccatccgagtggaatgcctccggtgaggtagtatcccacaagcgccggcaccctgttggttgtcgccattaaaagcgaccccacgattcccacgatatgggctacaatgcaccagaacagtcgtcgttgtgtcttcattgccagatatgtcaggccaatcagaacgaccacctcataagcacccaggggtgttacaagcaggagactttccgttttcgagaagcccatgcccgttaccatgatattcccgaaactcgtggcaatggaattcggcacatttgccgccatgacccagaaggcgtagagccaggtgtgcgggtcggtaagggcttcgtaaaactgggcttttttgaagacattgcttccgatgccctgtccgttaccccgaagacgctccgcgtgcattgccttttcttccggggacaaaaagccggccgttaaaggggaatcgggcaggaggaagaagaaggagatgccggtcgctacggtcagcaggcccaagatcaggaaaatgacctgccaacctcgcagagacgcgcttggatccccaccgatgtgcgttgctacgccgtatgcgacgtagccgccgaacatctgcgcaaacccacacatggagaaccacaggccaacgcggaaggcctgttcctccttccggtaccactgcgaggtgaagactacccaggcaggtatgatggcggcttctgcggcgcccagaagcgtgcgacagaccatcagggaggcgaatgacttgcatgcggccatacaggccaggatggtgccccagatggtcacgttgacggcgacgtattttgccagggggaatgattgcatcacgcgcattgtagggaaggcgaacgccagctgaccgaaaaagaagatactcgacacccagttgaattggttgcccttgaggttcgttgactcgcgcatccccgtgacactggcataactgatggcaattttgtccagatactgcaggaagtacacgatgcagatcagtggcatgatatacatatcaatcttacgcaacagtcgtgcagatgctgcgggatcgagaacgctcggcgaaccgccttccagtaactgcaatgctccatcgcctgatgtagacttgacatggggggttttttcgtcgagtttgggcgagacgctctctgctggggaaattgttagagcggtcatcctgacggtagtagcgatgatatccaccaagtgggaattcacagaagagacttacgtttgccttaagtacctcgtaacggctggggatttggccaccaatatcgatgggctagcacgccatcaccctccgagctgtcacaataaatcctaacagttgcgatttttgggtcgtaagtgattttcttggccgtagtgggtactcgcaagcgaggataatttatctcaaccggagccccgagcttgaccggtgtcaaccccagcgatatagcaggttgacttatggagtaagagaattcaaattgaacatcgcagcatctcaccaggctagatatagcccaataagcattctaaaaggaaatgcttagtaaacaatatcattaacaggatccgttacacgtgggacccaccgaaaacaagggtctgatcccccggttacccactacgggtagggtcggatatccccggttcccaccccgtaagccgttctatacaaaaggtacataaacacagcataacattctcaaccatggaaccctcaaggtgtatacatctatagatacatgtgtatataagggttccattgaactacatgtactcctaagattggatatagatatagaaaacatacttgatatatatttcataacaatccgatattcgtatcattcatcccaacataaaccttggtccctagctcaataaatataaatacaagaagactaaaatctaaaccgccgtgactatctatgcaagaatcaactcccatcccagttcctccacaatatctaaccaatgcacatttctctgccgaccaatcccagtaaaccgagcttcagaattaacatcctgtctcgcccacaagatccccaataaatcctttgcacgcctaacattcccaatcccaaagttatcctgtagcttgcccaaggaacgaagcacaacctctctgtccgctacatcatcactctcacacccgcagataaagatagggaacgtgagcgccgagtactcgcagtggtcacccagcgggaaggtttcaatgcggccaagacagcggtagacagcgacatttttcggtgtggagatgagaggaagccagtcttgcgctgaaagagatgggacctcctctagctgggcgtttacaatggcaccagggctggcagcgggaggggtattaatgcgctccatgatcgagtggagatagacaaatcctgcgtcacggaagcattcagctacgagttgaagccgagttagggttgctgttggtgttccttgggggattgtgtagggaattgaagtgtgagaccaggcgaggagggattcgtttctgagatgggatgttagtgcggatgttcgactggactatttcttctgtaaccggagagagagagagagagacaaacatggatgcaacactgagtcgaagagccaacgtatcagcttggagagaaggcagctctgcgatacgggcacataaattgaggagttcctctgtatatccaatatagatatccaattttgggatgccgatatcactgtcgacaagaatatccgtagcagtgatacaattgcggttgctgattcggcccatgttataggcatacacgaatctagatgttgatatattatattagcgttcggtaatataccttgcagggtgtcatacatacagtccacgaaggaactcggctgcatctcgatccattgaagcgaatccaccgcgtgaaacgatcagacgttgcaatgcattgagatgaacaacccactgcttaacgctaccacgcacgatctcatatttgcacaatagaccgactgctagcatggcatcgtcagggaacatctccactgaacacttgtctagtgctgtgcggagtccattgagcgttccactataatatttgagtgcagctgtatgtgctccaagcccttgggagcgatttgctagatgaagagcagagatggcacatacagccttcatcagcagaggtgatgacattgccctggggatcaacaacgatcgaaggggattatcatggctttctagatttgctatcagtcgagatccctgctccatgtgatattggaggaagtgagtctcatgtgttgtgagatgactgatatatccttgaagctgtgggatcactgcgacagagttatgcaaatctatagtcgggctaggactgtattcttccgcatcttcaatcgaactggtagcttcctcatacgagacatatcctccaggagaaaatggaacggaccagctcaaggaagtccccggcccaggggataaacgagtctcaagccatgcgtccgatgatggggacggtgcaggcgaagggaactgagatggcgaggacgcactgagccgtcggcgttttgaagtttccgtctgtgagaatacctgcgccgatggacttagtggctccacccatatagagccgtagccctcgcatgcccggccttgcttgagacaattattgcaactgaccaaatcagttacgtaactaaatcaaattctaactaactagcacgcaccttggtttggttttatcacaggccttgcgcctctttttgcaggtgatgcatcccgagcgagtccatgccgtgccagattgccgtttcctaccctttttcggggcggaagtgggttggccgggtgtgaaggaagacgattgcgccgagctattcacaggaaaggcattcatagtgtcaaggggcgcctgggggatatggagatgctctaacaggtactattgacagcatgcttatcgcagatattagacaaattcagacatgcatgcgctgcgcagaggaagatagataataatgtatacggcagtgccctaggcgctgatttggtcacatgggcggtgtaccgacggtaacatctgccgccgccgaaaagccggcccggcacataactaatggggagtagggaacataggaaaaataggaaagtaagaaagaatataaaatttccgccctggtaaccggggttgtgtgaaagggagtaaggcctcgctgcgcgccatgtgctgtactgggacggtcgtgaggagacaagaagcaacaagaagaaagacatggcgaggcagacgacaaacaccaccactcctttggattaccctatggtctctgagccacgggggttttctggcaggctcttcgagacggaagcgactaacgggctcgtctgccgataatcttcaaccactcccggccacaacggcggacatgctcgtcttcgcaagcacgctgcttattagaaagcggaattaccgctcccccgcctaacgctagacttgcagcagaatcaccaggtatcaggaatcgtgatttttctacggagtagattccgtagtcattgtattcggtgtcacgtgctaggtcttgcaaagaagagtgcattcagttcaaaatgacgaagatagagacctaaagatgaagcaagtgaagaagcaagagatggactgctcatatagctggcgcttctgtaaaatttgcaaacaatctatggaataaaaaatagtaagcgaacgagcaaatgaacgaaaaagcaaacatgaagcatctgatagcgatctatagtagatcgtgacatccgggataccgtagtagtatcaaccatgataccatggcttcttgcttcatactcacttattacagtatcgaaaatgcggcattgtaccattgctacgtagtgatccatacgtaagagaagtatgtatcacttatcgatagcaaatcacactaaacctaatttggacaatttcacgccgaccccacaattgtggattagagatcatgtgactttgcgctttaattgatctcctcccatgctaggatcaatcagtgtagatcattgagatagttgaattaaattaaaatcaaatttgtcagttggtcgagtcttatcgctatgagtttaactccgtatctccatctttactccacgttgccctaatctatcagagccaagactcttcttctccaactgccctggtttttttacccaatcaggcaggtccagccacaccttatgtaacccgataagaggcccggggcagggcccctcaggtgcgagatatttcaatgtacaacattgggggtaaattctctcattggatacctttcttgccctctttccttgtcccctcccacttctctgtggattcgtgggatatttccactctaatacttcccatagccgcctcagatctctatttctgaagtgtaccagaacgccgccaaaatggtaaccaaccacggcccgcacccattcgacccaatcacaccggaggagatcaagctcgccgtacgcatccttgaggcggccttcccgggtgtctctctgcgctacaagcgaattgatgtcaatgaacctatcaagagagatgttatcgcatacatcgaagcagagcgtctacagcggccgctacccccacctccggcccgtctcctctatgtgctcttccaccgcctggacaccggcgcattctacaaggctatcctcaatgccgacaggcgcaccattgtctatgccaaggagcttcccaaggaggtccaagtacgcagagcccctctccctcacgatgcaagcaatgggttaatcaatatttccgctctatagggtcccattgacatcgatgaaattgccggaattgaagagttgtgcatgaagcatcccgccgtactagctgagatcgagaaattgcagctgcccccgggcatcactgtttgtaatgacccttggatgtatggcacagacaatgacaacgaggaccgacggctctttcaatgcttcatgtacatggtcgaagtggatcacccccagaacaatcactactctctgccttgcaaattctcacccgtgttcgacggtctcactcatgagttgatccgtatggattacctgcctggtggtgctgatttcgagactacctctacccagccttggaagcctgtcaaggcaatccagtacgctcacgacctcttggatgagccccttcgcaccgatctcaagccatatatcgtacaacagcccgagggcccttcttattcggtggatggcaactccgtctactggcagaagtggcgcttcagggtggggttcaacgctcgggaagggttgattatctacaacgttacatatgataacagaaacatcttgtaccgtttggccgtttctgagatgactgttccctatggaggtgagtcggattggagcctcatcacccctaacccccggtagatctgacgcacatgcatctagatcccagagccccctaccaccgcaagcaggcgtttgatgtcggtgacactggttttggtatgaatgccaatcagttggctcttggatgtgattgtctcggccatatcaagtattttgatggttaccgcaacgactccaaaggcaacccactgcacctgaagaacgtgatttgcatgcacgaacaggataacggcttgcagcataagcataccaactatcggaccggtgccgctaccgttgtgcgcaaccgccaattggttctacagatgatttgcactgtggccaactatgaatatatctttaactacatctttgaccaagccggcaatatcgaattagaagtccgggccaccggaatcctttccaccgttccattcgacaacgagaatgggcaaaccgtcccctggggtactaacgtcggtcctggtgttatggctcctttccaccagcacatgttctccctacggattgaccctgctattgatggatttaagaacaccatctattacgaggatagtgttcctatgccagaagatgagaataatccataccttgtgggctatacctccgagtctacggtgatgcacacggcaggcacagcaaacaccagcgtggatcgccaccgcgtcttcaagatccggaacgacaatattaccaacccaatcacttataagcctgttgcatacaagcttatggcagctcctagccaaatgcttttggtcaacaagaaggcccacggcttccgccgtgctgagtttgccaccaagccgatctgggtcacaaagtaccaggatgatgaactgtacgctgcaggcgagttcaccaaccaaagccgccgcgccgagggcgtcgaaacttgggtgcagcgcaaggacaacgtagagaacgaagacgtcgtcctttggcatagtaagcattccttcccacgacttgatctgtactgtataactaacaacccctgcagccttcggtcttacccacaatccccgcattgaagacttccccgtcatgccgatggagcgcattagtgtcatgctgaagcctgatggattcttcaacaaaaacccggctcttgacgtccctcaatcctcccagttgttcaacaaatcttcactctacccggaggagaagcctgctgcctgttgtgccggagcttcgtctgctggccccaaggccaagctgtacaagtgcattgactagctcgatttcttttgaacccatagataccccatacccccatcctacggttcaagcactattctttgttttttttttatgaatcggcttgatgactcctttgattttcttactacccttttcggttggccttaacgataccttatgatgtaaataccacctctataaacaccatgtttcgatcaatattttcctacatttaatgccaaatatatcgactgcaaggggagcaagatactagtaaaattgtggttatatctattgttgaattactttgcacgtgaactgatatatattgacaacggagtagtagataatagtgcacagaaaatagcagatggcctcatgtaaaaaaatctgtggaacgccgaaatgaaaatggacaagaaaatagatgtagagcacaagataaagaaaaggaggaagagatctcaatgtagatccaaaaacatatcgctaagatcatttcttcatatgatgactagcatgctgaaagcccgaaaccaatgatgttaccgacggcccgagtcagagctgtgaggaacatgactctcaaacaggtcctcaaggtatgcgctaggagcacgaccctgcggcgcttgattgaggttcaaggaactcgtcgaggcacccacataagagtggcgctggttatgcgaatcatggtagacaccaacaggaggcagagagggcgacgataggccagcagtgggcgagtaaagaggctctccatttggagcggggttggagccaccggcagcggcgtagtatccagcaggcaggtatgttgagccacgattccccgtatttcctgtagcgtgcggatttgcatgcgatccagtagggccgcctgctgtaggtgaaaagaaaagaccgctgcttgtgctcgagacccggttgggcttgtagcttgcgcgagtggcggtgccgagtttatcgagagatacgtcggccaccggggcgacggggtagggggttgatcgcttctttctgctgccgcgcaggaggcgcttggattgcgaagcgtgccttactgcggcgcgccgcactgagcgatttacggaccatgcgaccattgcgcgccacgcgagcagagtgaggccgatcagccctagcgcggcgccgacggcgatgaacactgtgccttctggagcactgctctctttcatatatggggcattggctatgggtggtatcgtcacaacagcgccggttgtggtggaggaggatgttgatgatttcgttgtcgtggagacggatgatgtagttgtactgctgtcggacgtcgtggaggaggaagaggaggatgtggtggttgtatccatggttgtacttgtcgaagaagaggacgtcgtactggtggtagaacttgacgtcgattgagaagtggttgaagaagtggttgtctcactcacgctagaagtgctttgagtggtcgaagggtcgtcggtggtcttagcggcatcagtatttgttgttgtatcgtccgctggtacggcagacacttgagcagcgatgacaatgaccagaaatagtagcagtagggatgacggcctggctgttccaagcctttgcggtagaactcgcatggcagcgtaaacaatcgatcagctgctccacaatgtgcgggtcagtaggcgccgatcccaacgacagcgaggaacaaagcagattattatcaatttaaatcagcgcatcaatgaaatccgtttggcaaatttaagatcgctgctggttccaacaatgactgcggtctctcgtgaaatattggtagatgcaggtcaggtcacggatcaacaatcaacgaatttccatatggggtgaggcgttgggaaactctcataaacgaatgactgttgttcaagtgaggccaagcagttccccgaaaatgactacaagaagagacctttctaaccgaaaagacgccaacgctaaaggagaggggtgccttaggcaaccctgagattgtcacctgacagtcaaaaaaagatacaaggacttgcgcatttacgttggcaaatctaacattcgaaaaactgggaggatatgagatatcatacatgggaatacaaggtaattgtccctgaacccccgataaaaaaaaaggaaatcaattgcagcaatgggtggaatccaaaaatataacccaacaaagcgctacaaatcactgcgctttcttttgcacagcagccgaggtgtccttctcaaatgcggcatagggaatctcgaggctgcttagagcaccgatgccaatatacaaaattgcgaggaacaggaaggtagccatgagtcccatgaagatgcctggagaagggtgagcatagtgaatagatagaaggtgggattgatagatacatacctggggtgaagtattgatattcttcgaagagagaggtggaattggccgactggctcgaggcgctgccttgcgcggagtagtcccgcttgagctccatgtggagggtgtcttggtacgaatctccagagatgtcgtagatgacggaatccgtctcggggaactccctcggtgaggtaatgtagagaatagtatacttagacgaggaaggaattcgatcggcgacatcggcaaggaaaccatctagcagagttagtgagaaacaagtgcataggcggactgcatacataccaaatccagaaagctgctgtgcgcggtcggaacctaacgatagcatggggaattcgacatcaataattcggggacccttctcgaagtatgaggggtacgatccagcttcacattgttagctctgacgtccttcgcgggttttgccaagttccgtcgttggccatcaaagcaacttacaggaagcgtcaacggcggtagtctgggccttacacttctcctccagaatgcttttgacatcattgggttgaaccaggccagcgacctcgttgatgctcatcttggaccggatcgagctgtctttcccgagcatcttcgcacctaagcggggtgccgactttcgcgtcgagaagtcggaactgtgcacaccaggctggtagacgacgacatagtaatctgacggacaggtactgagagatgaggaaaggttctcgaggagtgaagttcctgtctggatgtaggcggaattcgtcaagaccctaagggaggaccgattagttaaccgcagcgcgagagattcaatcaagcatactcagaagttgaggcgaggaagaatggcgaagtatctctgaaagcattcacggcagcagccccaagggccaatagcccgaaactgctgagatacattgtgtttggcgtggggatgggtcaagttggcgatgatgttgccaacgggaggtgtccgacttggcctcggaggcggtcgagaaccccgacccgcctgagctttccatatcaacttttttttttttggcttttgacgcagtttcaacacaacctacgatatacaaaggtctactctcgattcgatccaaatatacttgagattgggattttcattcaccatgggtcccaaggatttgaaaaagcgcaaaattgttgctgggccgaaagttgaagaggtcaatttcgacgacgaatcccgccatgaatacttgactgggtttcacaagcgcaaagtgcaacgggccaaacatgcgcaagacaatgccgccaagagatacaaagaggagaaaagagaagcaagaaaaaaggttcgataggcttcaatttgtgcccaaagacacccactaatttttctagattcgagaggatcgcaaaagagacttcgaacaggcaatggcggagcataaagcagtactcaagcgcatgaaagaagatgctggagatctcggcgcaatggaaggcgagaaagaggaggaagattgggagggaattgaagagcctccagcagtggactacgaagccgaatacgtcgacgaggacaaatacacaacagtcacggttgaagaaatggatgcatcccgtgagggtctgcttaaggctgccaggggggaggactcagaaaatgaagaagagaaaaaatatccggtcgagtcgacagaggatgacacaaaggccaagaagagaaagccccggagtgcagcctcagaagcagccaggaaaaagaagaggaatttccgctacgagaccaaggttgagcgcaagcaaacaatgttaaagcaaagggctgtgaaagcgaagagagcaaaggcgcgaaagggggcagaggaataagggaaccacatcttgaaagagatacgacatcacatgtgcatatactcggcttcaagcaattattcattagtcaattttacagatcataggcgtttgacatcatgggagatacaaggaagatgcaggaaatggtagacaccgcagtgcacgttgcatgataaaaaaaggtattgctatcaaaagcgctgtatccggtccatacacttgggaccagtgtaacacaaacagtcacagcatgaaaaagcagatgacaaaccagagaatgaagcttgtatccaaccatatgtttcccgatatcctgcacctatcaccggttcgagccagcttagatatcggccatctgggatgcaaggtcgtcaagctccttcttcacagtgctgtgttccttgatcgcatcctcgtatctttgctcgagcttggcgtgttggtcctcgagcgcctgcaccttccgctcgtagtgaccagccttgatatccgtttggcggagcctaagtgcccaatatgtcagtatgtaactgtgaaagaaccggcggctgatcgtacttctcattggtttcccgcagagtcttgtcgttctcctcggcctcctcctcaagaagctgcacccgtcgctgaagggcctcgttctgagtgtcgtgctggaggctctggctggcagcatccttagcctccttgagggcggcctctgtcttctcaacctcctcctctagaagctggttgcggtggttcagggatgtgatctcttgttcttttgacaaattctcctgttccaaggtcttgaccttggccttgagctcatcgacgagctcgtgagcctcatccgcctcagcgcgaagggcgaccatgcgctaaaataaataccgacacattagtaaaatattcagtggagaagtgatggaatgctggggtggtatgcatatatgcataggaggaggggctgtgtgattttgggaggcagtcaagctaccccgccggcaggggaaatgacttacctccttgatcttgtccattttaacggtattgaaagggagtaaggaagataatatgtatggttgaaaagaagagtagtttggctttcgctcagcgagaaaccgggcgagtgttggatgggtgtggaagatgatatggggagagttttgggagagaaggggaggaataaaggctgagcagggaacaagtagacagtactagcccaacacgtacgagctccactacaggggaagtaccggatacttactgtgtaccaacggcgtacccgtggtatggttaggtacacaatccgctctggctcgcagccaatcaccgcccaaggatcgacgcgtctccacgggcaaccacttgacaacacttccagggctgcatctagaactgtgctggctcttgattacactcaacacacttacgacacgacttggatttctttgatacggtgcatgagaaccaacagcttcagttggccaccatgttggctcttcgcgaccaggaaaacctggtaaatacccaccagaccgccgcggctgctaagcccttgaaccaaagcaagccgctggcacccaagacacccggcaaggcacgaaatgacgagaacaacccactggcatttggaaaccgcacggtgaagggcaatgggaaccgccaggataatgggaaaccgggcaacaacgcgttcatgactccaatgggtacgcgtgctgcgcgaaaatgacagatttgcaggtgacgttggataatgactgacttgtcttctcgcgtatagtgagggaccgagctcctctgggcatgaaaacgaccaatctcaaagccaacaacctccaaacccctgcgccctttgggggaaccaagcaaccgaggacaaaccgcagacagtcgactgcccagaagatcagaaaagctgccccagtgacacagcaggcccaagccaaagtccacatcgatgctgctgcagatgatgtaccggatattgagtacatgccgccgaagcctagaggtacgctaagcacaactagagctgcaacccaaaagcttatttctgacgagctatagatcttccggaccttccagacgatgtgacatatgacactacattcccccaattccaaccgaagaatcgagctctaggtttggagagtgtttacggaaagcaacaagtcggcagcgatggactcacggcgaaacaacgcaaattccaggaggattctgcggcgtgcgataggatggtgaatgacatgatcatgaaacaactcgacgacattggttttgagagctctggtgagaacgagtcgacaaagacacttgagccaaatgctatcccctcaaaaagacctacaaccaccacacgacacactcgcaatgtgtcgacgctccgagctcgtgatgctgtcgctgcgcttggcggatcccggccaactgttgcacctcgagtggccccaatcccaaagccacgggtggcatcgttggcatcgtcgctggttatgcccaagaggcatgccagagtcccgtctaacccatcttccatgcgcaatactgctgccgttgtcaactctcgtacgaccgttggctattccaaaggacgcaatgtgtcgtctaccctgcgtgataatcattcccaaacgcagaagccctcgagctcgcaggtcctgtctcccgaaacttatatgcaactgtatggcccccctccgctggactcggaaatgtggactcgttgcaatgctgctggatgtttcgatgccccggacgagatcacccaggaaccggaagaaccattgcccacgtttgacgaagatgatgaggcccagagcttccagctcactctgtaggggtacattgcgaaagatacttgacatcgacagggggattacaattttacttcagtatggttatgatttggcatgtggagatcgacattggctcatatggtgtaggggtttggcggcaagccgaaggatgccggcgttatggaatagtattaatgtacttgtaactggacaggttgcagcccttcaaccgcagaccaaattgtttcaggcgttctccactctcatgatgatcctttgccaagaggtagacaggcgagggtcgcacaccaaaacttgattaagtgtgaatcctcaatcactgttaatcgctgttgtgttcacacaatttttatgaatcggagaaacacactacccactagctacacggaccccataaatctctgcgacaatatttcacgtaccttagtggaattagtggaaaaaatagagcccaatggacgggagagtaaagtaaactcggtgtacctcgcgggtaccaggtccccagccaggccgcccgggtaacggcaagtaccaatcatgtacttccaggtacataccttgatctagcccacaccgccccggaattgcccataacttcttatttactctctggcctctccttttcctctcccattcctctcaattgacgcttcgccgccatgacgaccattcatccggactccaccgaggagttcgaatacatccagactccggctgcccccgcgcagaccaagcctgccttcgattgcggtgtcccgactaccctggtaagtgcattcctagagctatccgtgaccgatgtttggtgattccagggcctaatttgcttcatttccattcagtacccgactattaagaatgccccagttcctgccgactctcccggcagcgacagcttctccaatggcttgatgatcgctctggagatcatcgtgccctggtggctggctcgccaggttggtggaggtttctataccaccatcttctttgctctcttcacctcagttcccgtcctggtggcattctgggctgtctcttcctccgtttctcctcgcaagaccgagaaggccaagtactgtggccgccccgtcgagcactacctgcagttccacagcgagcacgatcgtgctacctaccacggcaagagcaagattcccatggaggtcttttatgagaagtacttcaatggtgaggttgacttcaagggcgatgctctggagtgcctcgagtaccgtcatgactgggccaacttcaagttcactactggtcttttcaagcatttcctgtttggtttcatccccgagatgctgatgcacactcgttctcagggtaagcgactcttcatgcagctctggtggcaattctaacattgtgtagatgaggagcaggtccgtgatcactacgacagaggtgacgacttctacgcttggttcctcggcccacgcatgatctacacctccggtgtgatcagcgatatcaacagggaggagaccctcgaggagctccaggacaacaagctggccattgtttgcgagaagattggtcttaagcccggtgaccgggtccttgatcttggctgcggctggggaacccttgctaaatacgcctcgacccactacggcgctcacgttaccggtatcactcttggccgtaatcaaaccgcgtggggtaacaatggtcttcgcaaggctggtatcgaagaggaccagagccgcattgtgtgcagtgactaccgcgacgctcctcgtattgagggtggatatcaacacatcacttgtctcgagatggccgagcacgtcggtgtccgccacttctccactttcttgtctcaggtttacgacatgctcgacgacaatggtactttcttcctgcagattgctggtctccgcaagtcctggcaatacgaggacctgatctggggtcttttcatgaacaaatacatcttccccggtgccgatgccagtactcctctcggttttgttgtcgaccacctcgagggcgctggctttgaagtcaaggctgttgacaccattggtgtgcactactctgctaccctctggcgctggtaccggaactggatgggcaaccgcgacaaggtcgaggccaagtacggaaagcgctggttccgcgtaagtttctctcaggattctcccagtggatctttctgaggtccatgcactttcttactaataatatctctaattagatctgggagtacttccttgcttcctccactatcacttcccgccagggtggtgccacctgctggcagcttacccttgttaagaacatcaactctacccaccgtattgagggtatcgctactcagttcggtcttgctggagctcgccagagcgccatcgaccgcgctggctcccttcccaaggcccacattgtcaagaaggacctttgaaggattgatgtacaatcatagccatcatctacttctccgagggtacatatcagtccccctcagactagtatgacgttacgtgaggcgcggcaatatgctgatgtgttctactgtgaacatattcaaacttataaccaagcatgtatgacatgagtgacatgacgcgaggtgaggtgaagctaggtgaaattgaattgcgtgagtggtcgtggaagaaaaaaggcaggagctggtagcgaaagaagcatggatagtcagaggtctatctggctggtccgcctggatatctacttcgatatttatctgtggtcgtgcgtctatttcttatgcctcaccctgtctaaggggaatatttgtacgaagtcaacgagtctgtctttgtcatgttattttttaagaagtcaatgactatttctttggaccgatacttgcagcatatcccttcgcttcttcgcttcgaatcagtaagattgctccactgagcccatttcacaggtgaccagttagagtttgtactaaggccatggagctcgcaagataatgcaacagaattctagggcgtcaactttctgctggcatcaaactctaattgtatcgtctaaaaaagtcgtgatatgtgtctataaaccgaattcgagtcttcaatcattaggttcgtcaatcaccaaaactttcataacaccaattagatttctcgacagctaagcgtcgagaagcaaaggaaaagaaacaaaagaccaggattgcgatccaataggataaatggtatatgtaaagagggaaacaaaggcaggatagatgcagacgtcagacccggttgaccctaggtaagtattggtacagtgaagagtaaacagaaatccagggaaatagaaattcatgcttgtcgcaggcccagagatccaatccaaggagtctaagaaagcatcgtgcatgaggttacacacatctagttgattgacctccaaaagaaaacaataggcgtacaagggcatgtggtgaggtgttccacacacgccgggtggaaaaaaagaaaaagaaaacaagagccaagctcagttctcatctaccgctgctctagcattggattgggtatatccggggttttggttagggcaaaagaagcccgaagactcgaccgttgtgttgggttgagagggagagtttttctgtgtcgcattctcgttccaaatcgcttgagatactgatcaaagacgaaaggtttaggtaaatttagtccgcgtcgaatttatggttgtattctccgagaaggacgtcatctgggcccgggccatgggtatttcgaactagtgcacagaagcgtgagtggaattgtccgaaaaccaggatagtggtgcatgggtcacacggctgggatcagggggagtgcggatgcacaggggggaacatactccattcagcttccgtccggaagaacacccacatccaacgtcgtacaacttcgaggaacatgagtatccataatccgctttcagtctccgaaatccagccgaggcctgggacaatgcgccatagccatgagaaacgaagcgccagatccgcgataatgacgtagtggtacatcttgtcagatccgaagtaacgatgccggcggagtccatatggatggctgctgtcgcgagattccgaggaaaatagagtcatatcccaatccttgacgacatcccaccagaaagagtagccggagttgataaaagagacgagaaacctgggggtattagagaaggcatagacacaacacatgagggatacaatcttacagaaggcgcatcatgctaacctcgctatatccacgtagctccaatggattgtagttgcgcattttggaggctatccaaatgaccgggaacgcacttgcatacttgagagcgttggccaagtgctggtttaacttgtgcgtctctctccgggtgactgtccgccgcgcacgataatattcagtcaaacactgacgaagacgaatcaagctaggaacagcgaggatgatcggaacgacgatttcacttccacaggcccggttgggcttggaagtagcggcgaagccatcggtgaagaacatgcagaagctgatatacagatctccgatcacgcgagcatagctagtgagggcatctgccagcagaatgtcaccaaacttgccatccttcgactcggccagaccgccaatactgatccgcttgagggtaaggagaaaacggattcgaccggagcgggaggcgcggttgaaaggccagatcagaataaggaggagaacgatgtacaccgactgcgggagccagtccagtcgctcaaccaattcaggggctcggcgagtgactacccaaaagacgatgaaccacagagcaagtgggatagtaaaacatgtggccaggcggtagacggcgatgtgatgtgggcgttgcgaggaggatgtgcgggcaggatatttgatgagcgccgggacgtcctggaagtatgggaatctgatcagccgtcgggaatacgctggctaggtgaggggcgtcactcacgatgttggcttttgccaagtattgaaggttgagtccccatccccagaaacctagctccttgtgttagcacactcgggaccgaacccgatcggacaggaatgtcacctaccagcgaccaagatagcagctatacgtagcggtaaagggaagatcagcccaaaggcatccaattgagcatgttgatcaactgccattattccattgatcaggggggggggaggcggggggagatcgcaggaggaataaagggttggagcagcaacaaagaccccttggatatgtaaccaaaaaggaatgactagaggtgagtcgacgtctttgaaagtccggaagttgagacttttccagtttgaagccgctcagggcagtttaataggcggagaggaggagaatacgcgcctggactagtcacagtccgcggatggtctggaaccccacagcgtcaaattgggtatataaaattagaactcattcgaagcacatcgggaggaagagcctgaagcgggcgatttttacgggatgtaactactgccagaataccaacgtatccatgtcatcatcggatcaaagggaagaggccaaagccatggacttgcgattcaaggcccctggatttcttcaggaaaaggggtaccgaggagagttaccaaatcaggtacattcagccactcgaaagcctcccgcattcgtctgccacaacgtccaacctttcagggccctgggaggttctggcggtggggaccaatgacgcttgcggcgtatggtcaccgtgttacggtaagttacgggtatttttgaaattatgtcattgaggtcatggggcagtcaagagggcacgtgacactgatctaaccataacgggaagtcagctgatgtcactctataccgaggcatcacatccgagggcaactccggggaaattgtgatctccaccaggtacgaacgtcggggaattgagcctgggactcgtcttggtagctataccaaccctctataacccgtcatggccgacgacgactcccatctctctctatcaaccccgaactcagccctcggctcctctacctctcacttctaccctttcgcaacctcaccagacatcatccgctcgcatgagaaggattcattccttacgggcagtctaattcaacaatctcaagggatcgttcgtgctctccgcggcgcccgatacgcccacacccactccgacgccatcaaacacctcacagaactcctctacttctccctaacaaccgccatcggcaaccgcaccctaggcgaagaatactgcgacctcgtacagctagaagatgacacacttcaattgccgtcaattggccgtcgcgtggggtacttcttaagcagcattctagtaccgtggacactgcagcggctactacctgcattgcgacagaggatccgcaacaagctcgagcgcaacattgcacgccaacagtcacgagcggcgcagcaggctggcctgctcaacaagccccagttctcaaccaccccgactaaacggccgttgtttacgaaactgcgcatccagcagtatgtccttgaacacctggactccatcacatccttgtcgcccatttatgcgctgagtattgccaccttctatttcacaggctcgtactaccacatctccaagcggatttggagccttcgttacgttttcacgaaaaagatcgacgacaatgagcagcgcatcggatatgaggttctgggtgtgttgcttgttctccaaatcgccgtgcagggattcctgcacgcccgcaaactcgccgcgagcatgaatgaagatgagagcgagtctacagacgctggtcagtctccctcgcagggtggagctgttctcgcttcgattcagaacccgtcctctattcctctccttcctgcgtctgtgcctctgtatgatctcgaggaggatcctggcgctgtctcatggattcccgagggtcagcagcggaagtgcaccctgtgtctggaaatgttcaaggaccctagtgttacaacctgtggacatgtcttttgctggatttgtgttcgggactgggttcgtgaaaagcccgagtgcccgctctgtcggcaagaggtcttgctatctaaggtgcttcctctaagagggtagctatgtggttagcaataagttataggctagtgctctcattatcatgactatcgctgaagagattagcgcagtcgatacatgtgtatacacttttttggacaaatatataccccctgtttctatttaatccgagcatggtttttatggactgtatggttcgattgaatcttgacatagatcacccaacatgcatttctacaacgtacatatagatcgagggcaggacacaaagcaccataacaaagggacgaaataaagaaagaaaaatgcctctctagatcgaaactgcacaaacatataatcttttaaaactttggcaaaataaaagagtgggatattgaagggataaataaatctaggtacatgtactcagtatgcatatatacatggtcaaatcagtgggtcctcttcgccgttgaccgctagtccaagtggaagaacaatgggttggttgagttcagcgaatgcgggacgaggtggcattgggtccatggcttgtcttttcgcttccatgatatggaacagacgaacgcaggcgtacggatcggtagcagcatctaaagaagaaaacaagattagcatccaaggagagagattgtgcaaatcgaagtactcacattgaacttgacgataactcaaattccgagtccaatcaccgcagcgcacatcgtcacttttctcgagagggagaccgaaatgctcgtttacttgctcgctgagattgacgcctctcttgttcaccaacttaggattgtctttgccgtatttgatcaacttgtacaaatgactgagctcgaaggtggctttggcatcaatgccgagatacttgcgcagccgtgtgcagtctgccttgatcgaaacacccactttaatgacgtcgggagattcaacgaggcgtctcaatgacggagaaactaggtcctccagagaacgtgcaggcttgaagagtgcaacctgaaagatggcgatacgttcctcgtttgctatttggatcaccgagacattgctctgaatgctgtcgaagcctgaggcttgagccttccattccatgtcgaatccaatgactttgctcccgaggaagtgttgcacggcttcttcggtgctttgaagggtccggcaataatgcacgatgagttttcggccatcggggctttgttgtgaattatgggtccagaactggggcgtcgtaagattgctggcactggaaccaatgtctgaagatggaattggctcagccgtggaatcattttgttcagcagatcctgatccgttcgtgggatcccggaccgaggacaaatgggtttcaagtggccgttcaaccagggaagtatcactggcaccactgctttgtcgaagctgtgcttggtggaaaattgcacccgtgctatactttctcccatcgtttggttctggtttagcgaatgttttcttcggaaacatcattggtcgtagtctgttacgtgtccttgtgcctgggaagtgagtgctggtttctcttggacctggcggacggaggtcatcaagacgtggctccgtgctgaggctcacgtctttactcttcggaggcataggccgtggcttgggaagaactcggctagaagccgcattgaccaggaacgggttggactcatgcgcgtcgaggctcctaaagtttctcttccgggatttgggtgatgacttgtaaatgacctgactgtcctggccgtcctgaccgtcctgatcggtaggcgcattgactaggaacggattgaactcatgcgcgtcgagactcctaaattttctcttccggggtttaggtgatgacttgtagatgacctgaccgtcctgaccggtaggcgcatcaattggcagtggtttgtattcaagatcatcctctgttgtttggccctcagtctttattgtcgacagatcaggaggcactccgtgttcaaggcggctctccccttgactgccttggtcagcagctgactcggctgcaccctcttgttcgattcccctcctcacctgcgttctccatttcaaggaactttccttgggtatcacaactggaccggacgtttgattgccctgattcgtaggcggagactcgatatggctcaacgatggccctttgatatatctttcgagacggctttgagataattcgatgaaagcggccttggcagattcggattcctctcgttccctacgtctggcctccattgtggaagaacctagctctaatatttgggagtttacgccaatgttgcgctcaatctcgtcgtggatgagctcccactccggccgcgttagtcggctggccatcaagggaatataagccccacaagcgagctggcccatgcgatcggtccatttcttgaaggcacgggtatcctgactcagtgggttgagcacttgaaactttccagcaagatagacacgttgtttcattgagcgtagcaatgattccgatcgaagacgcagccagtttagatgtatgtattcagacaccatctgtcgaagagcgctgcgatgtttctggaattctatacaccagtcggctatttttgaaacagtggaaaaccgagtctgcccagagaccctagtccacaattccccactatcacctctcaggctgtggtaaaggtaccaaacttcattttgaattccccatgtgacaacttcagtcatgagcagtggcgctattacatccaattgtcgccagtagatatgtagcttagggctgcgtggcggttttggcctccaaagctggttgtattcgaggtagatcttgttggatatcaggagtggactttcgtctaagtaccgagcctccggggagtccttcggggcacccagcgcaagtgcaagcaagacccgcctgtcagtagcttcaggagaacgtgcggacgaaactgccgtcatgaaatccctcaaattccatagttcactgtgtcgaagtggatgcgaagccatctgcctcctgagccaatatgcacggtggtgatgcgcacatttactaatttcgagataactatgctcaaggatttctttgtactggccaaacacccatttatcggttgcgcgaaggttcgagcgtgcttgaagggacgagcaaaggtccctgataggaaaaattcgtgtgttatcgctcttcagtcgtaactccacgtagttcttctgaatcagattgctttgatgaagaattctatcaatttgttttcttgcggtattccggggtcgtaggaaatccttgtcgagataatttttcaatcgatggatggacagctcggaaaggtgaaccagaggtgcaaggagtgtcttttgagacgtttgaagacacttctgccaactatggatcttctgggcggacattgccagttcgctttcccattctggagttctaccaaaaacaatacagcagaaaccatgatcaatcattcgacccgtcttctctgcttccgcgacagcagcctgtagtcgttccaatcccattatggaagatgaaagctctatcacttcggcgacatatttttgagtgatcttttctgcttgcagaactaaattcgtgttgtctgagaccatccttacaattctcgcggtgatggtacttgacaggctttccagttcagtcgcacattcttgggtggtcttttcagcatggagaacctgtttcgttatccgtgagaccacatcattgattcgattttgaaatgttgattcgagagctccatattcagcctcataggctagtatggccttgatagattcatcaagaagatcatcggcacgtttgtacttcagctggatataactcccaaccaattcctgataagaaggcagcgaattaagctccttctcaatgtgcagacgttgagagactcgggatttcccctctgctctcgatcggatcaagctgcctaagtctcgatgttggacagggcgcacaaaagcagaccggcctggaattcgttgtaccggttttgatacgggctttggctctggaacttcatcatcgtcatcccatatgccttctttgcgagtggtattgcagaagttccgcttggattgagaggccgtgggcggggcgtacgaggagcttgtattcggtaaagacacatgtcggagcctcgggacagatcgagcgcaagcactgtagtttagtcagaaaaatagccatcaaagctgaaaaggaaataaagtgtgcttactgctgacgctcgaaaagtcctaatcgcagtgacccataggatctggatccatcgatgtgactgctatgttttgcaatcgaagactgggtcttccgacttgctaaaagattcggccgcattggcataatgtgtgacaagcatagtggaccagcctggagccccacaaagcaattgaataaagtcgaattgattgacaaccagtggtaactcaaacgaaagtgcggctagaaaatcgagtgagggtcaggatatgtagtacttcatgttgcgcaaatcaactttcagagtttcctctaaaccatatttggattagtctctcgggtcggattatcaaaggtgccgagcgacaaacgatcacgtccttttctatatcgatcttgcccacgcggaatgctcgatcacctttgttttaaatcaagacgctttctaagaaaataattacgagcacattcattttctgtctcccaacatcatggcttctcagctacttccccttggtccgtgcctaatgacccaagaaagccatgaccccgctaactgatctgatagagctcattgataagtgtgttggctcccggatttgggttgtcatgaagggtgacaaaggtcagctaaaaatttaatggttgagcacgaaactgttctaatgcttatgaagagttctccggcactttgctcggattcgacgactacgtcagtgagtatccctgcataagaagtgacgatctcaccaggcactaatttcgatttagacatggttatggaagatgtgacagagttgtaagtggcttggcttttcgatttttagattcaagctacccttttcccttctgtggctgtgctgccttggctcctacgtctctgcgcagtgcgatttgcaaatttccgcgaaattctcgacaggtcattctgatgattgtgctctggactaacctcctctcagcgactacaccggtgctcaaatcaagctccctaagctcttgttgaatgggaacaatatctgcatggtaggttaaattcacccgaaggccatctggatgctatactaactcttccaccagttgattcccggtggtgaaggccccgcggcaagctcatgagctcgagatacccagtttttgccgtgacgaaaataaaactttgtgtattaatgataccgaatccaacgagatagaacaaagtcgttgaatgaatgaagctccatttcaagcgtgattttatctcaccccagtagcatgtggctcagtattgaagtaagacaggaataagctgttgtcaacaccaagagaatgtgttcttcgcctaaaagcatattcgttattatggctagtcacagcctaggcgtcttccggcgagagggtccagctgcaacctccaatgatatacgaaagcaagtatggagtatgcaggaactactctgtagcccacaaaagacctcgggacagtcagcggtagtcagcggcagccggcagccggcggtctaagataagctcgccaatcagaagtcgtctctacccgagaccagggtatcgacggctaacctcgggcgccgcgcgctccggctattaacaatattggaagcatctcatcgatacgagtaaaggccgtttgccgcgtgctgatcggacaattctttggtggatatcatggtggatgtagagacgcaattgttttgactactccacatttaacgtgttcgatggctatgttgtagtcagttgactgctgttaagtggaaattaatgatggagaaccttaacgagcaggtgattaggatgtgatcatttagagtacattattcaatgaataatatatattatagacctgcctattcggtagatccagacatgttgtagactggccgaatagtagtgccatgccgtagagctcactttcgagagtcagctctgactcacgataatacacgccgtacgtgatgtgatctttcaatggccaatctaaagtaaataagctgccaggaccttggaaaagtggcacttggccagggacaggaaaaggggtcgcggtgcacacgggatgtcagggggctgcaggtgcagtatcagccgtctgcggataatcatggatattcgttgagtattcaccttcaataccccaaattctatcattctgaagatctcggtgctgtttcattgtgctgtctttccccagactccaaagttgactagtcaacaagttatgtggaaactgttacctaacagattgtcatccccgcattttatatgcacctaatgttgacttcgtatttacgacaaggcctgtttattctggtcatgttcaacatgacggtttttgagctgggtctaaactattggataccgagcgcctcatggacttgaatgggaacttccgacttggctgtcgggaaatatgaagatgccgagaaggaatattagaacaaatgtatggagtacaatattggatgtatattgtgtctttgtccattccgtggcggtggcgaaaatcccaatgcgcattgcgtgctgtttggcccgggctggacttatttatggggaatttcgtcggcttgaataacctcaagtgtgaaatgttcggagtactccgaggataatatagacattttgcggggtattacccgtgacttctgttgctcaaccttggaacttgacgaacagccttagaaaggtccacgcgtggccaggtgtgtctaagggggagtgtagatttaaccgattccacatgagcacctacctatgtaggcaatgttgtaccataacccgggcgcagccgctgacctttcaacagtcagacttggctctatcatctatgttgtagtcaccggaacacaaataactagtcatcaatcctgcccgatgctactgtggctgtcttgttgcgggagcgtggccagtaaaatcagctactgcgcgccatcagctcggaaaggcttgggtggctgatagtcaagcatagactcaatccagctcaggccgaagacggtgcgcctttttctcgcccccccttatggtctgaccgcgttgcatggaccaaaccttggaagtcgtaaaattccctatctcagaaaatggtgatgcgcttgacccgcaatgcggacatgcaagataagactggtgggcccgtttacacatttcaatttggccacaatgagcttctctcgagtttacagtcacacgattgtgaacaccttgagatcttgcgttagccatgattaatgattaatgtgattaatgtttcctggacggacatgtccgaatccagcggatgggccacaaaagtctattggcggacctagggcatcctgatcaaggtgttgtgaaaattggccagtgataatacgagggtcttgctgaacacgccgacaccaggccaatcattaagtctatgttgtataatgaacctcctagcacacactcttggctttttgggaggcttctcccgtgcttccatgcatatcacaaaccgccacagccacgtaaaaaccttcgcgtcgaaaacgccgacgcatagagtttgcctacagggtctcgtggcgccatccctcatccccaccagagctcatgccagtctctagtagcgaacccgaccgaggcggtttcaaatgtccgcaatcaatcgtctgcctttctgcgcacatacaacacacacacacaggccaagaggctataccgaggcgacgggcaggaaaactcaattgaggcaagtttgcgaacaagcctcagtggggcgaattcctcgtccatatggcattgcacgcatatccctgtagcccatagcgcatgccacaggaacggggtccgtcgggaagccttcccataggcaagggatgaacgacgagaggaattcccctgccgtccactggtcagcacagtagtgtgagtatgtttcttcccaagtaaggttatctcgttccaaacttagaatgtcggttctgcgagataaaggtcttctagaaggacgagaagcggaaaccttggaactcgcggacactatggaggactcgttccaaggttcaaaggttgccccggtggaggtccgggggaaagggatgtgcccaggtgtgctcttatctcccgaggtttctctgattgggcaacgatcgactatcgtccacgggtagagtgcggagagactgacagatggggcttagtggatctggggagttgcctctttcgggctccagaagcttggcttttccctgtccacctacagaatattaaccagatgaagtcgttcaagggttgttagtatgactgcatggattcagtagtcatgtactacgagtcaggtcatggcgatagtcaagctagggaggtgtagatattagacatccatgaggtagatcctcccgtcccgttatgacagtctaaatcacgcgagagatagataagtagtggcgctaccggggttccacctgcaataattactatttcgcttttaccttttttacctttttgctctaaaacaataagatagtcgggtgaaacactaggtatggagcttccacctcaggatcaagcgggcttatcttaggaacttgaacttgaccgtttgcagccttgcaagggtatctcactgcatatgtatgaatcatgatcaggatcgtgtgtaactcatagcctcgcagaacactgagtaaggagtacaaatgcatcataaatcttaattaaaaagataaattgcctagtcgcggactcgggacccagagcatgccaaggttatcagaagattaaatgctgttagtgcggaactctagatggtctaagcgcatgaaagcagatagatttaggtgcttttgatttaatttgattcgatttgattatatggaacgtaaaaataattccatcgcttttatctgaaatcggactggttgtatttataccctcccccccctcccaaacggccaaccctctacttgtttcacctctgtgtcggttcattgaccttaactcccacagaaccttcggcttcagcgaacagatacttatttctgtcctgaaaaatacccactccagaagagaaaaatttcacattctcaccatggatgagaagaagtttgaggagcacaccgtccagactggatcggatgctcccccatcctatggcgactcatctccaacgcgaggaggcatgggccaacgaatcattgacagcttcaagagagaccccaaccacactgtcctcggtactcctggagctgatggcactgccatggatgtcgaggctgccgccgcccataacactgcccactcaccactgcagcgacacttgaagggtcgtcatctgcagatgattgccatcggtggttctatcggtatgttctgcgctgattcgtctccatcctattcggtctcgctaattacatttactatgtaggtactggtcttttcgttggttccggatctgttttggccgtcggtggtccagcctcagtactgatcgcttatattttgatcggatgcatgctttactgtacagttcacgccttgggcgaaatggctgttcttttccccgttgccggttctttcgcccactattcgactcgtttcatggatcctgcttggggtttcgctatgggctggaattacgctcttcagtggctcattgtcctacccttggagattgtcgctgcttccatcacagtcgattattggagcccaggtgtttcaaacgctgcctgggtaaccatcttctgggttgtgattgtctcaatcaacatgttcggtgtacgaggatatggtgaagccgaattcgtcttctccatcatcaaggtcgttgccgtgcttggtttcatgtaagctacattgctgtttggcgaaacttgaacgtctaactgacttgactattagtatcctaggaatcatcctcaactgcggtggtggacccgaaggtggatacattggtgccaggtactggtacgacccaggtgcattcaggaacggtttcaagggtctctgcagtgtcttcgtcaatgctgctttcgccttcgctggaaccgaacttgttggtcttgccgccgccgagaccgccaatcctcgcaagtccctcccgactgccgttaagcaggtcttctggcgtattgctctcttctacgtggtttcccttaccctcgtcggccttctggtgagatacgacgacccgaaactgatcagcggttcctcctccgccgacgccaaggcctctcctttcgtcattgccattgagaacgcaggaatcaaggctctgccttccatcatgaacgttgtgatcatgattgcggtcctctctgtcggtaactcctccgtttacggttcctcgcgtactcttgctgcccttgccgagcaaggccaagcccccaagttcctcgcctacatcgaccgcaagggtcgtcctctacctgccattattattgcgtctgccttgggtctgctctgctacctcgccgcctccgatgtgcagacgactgccttcgaatggatgatggccatctcgggtctgtcatctatcttcacctggggttccatctgtgcttcccacatcctcttccgtcgcgcgtggaagaaacagggccacaccttggatgagcttgcattccgttcccagcccggtgtcattggctcgtgggtcggtcttaccttcaacattctcgtgctgattgcccagttctgggttggtttcgcccccattggttacggagaaatgacatctcaggagattgcctacaatttcttctccgtctacttggccgctcccgtggttctggtttcttacgtcggttacaagatctattacaggtgcaagtttgtgaaatccttagaggtggatttggacaccggtcgtcgcgatcttgatgtccagcatttggttgagcaggaattggccgagcaaaaagaatggcccaagtggaagaaggtttacaagttcttctgttaagcggatgttttatcttttttttctttcgacatccccccttatgtactacatctttacgataccataattgcgctatgaatatcatacgaaacgttcatacattccaaagggcataccctatttttaacaatttccaagacactactccgtactccatagcacgtactataatctcgagcctccaggcttggcatatctgtggggaagcgtttagactcagtagtcaagtcaggcatctgggcataacaaggctgacaacataggggtagggtagttatacatagtactattgcactccagggctatacatctgtattttctaatacattttgattgaatgtatagttattattagcctacccggctcacagccacaatgcaaagtcaatgcgcaattcaattgtaaacaaaaaatagacaagacactcctccccctcccccttttttttctctcagcatgaaaaaaacagccaaatttaaagatttgcagcaaattaccaccccggcgtaattttcaacccaaaaatagcccaaagtggatgcaaagacggtggggagaggtcgggttgtcagccaaaaggacgcttgttaggcggtaatggtctgagatgtacgcaaatccccgtaatattacgagccacatgtgacgccctacgatctggaaatccatgaactccatcaaactccatctctatctccatcttcatcgttcccattcggtctttctttgtttttgttgccagcttcctgacgacttgcatcgcaattcgcttggcctggctttcgctcattttagcttcgaattcatccgcgatatcggcgcctaacaccctgcgcactctattctcacgcattccaaagcgatcgtctctgcttcgtcattggtgtttcggtctatgcgcagctccgtcccgtgtcaagactggacattgaattcaaaaccaagtcaactggtcctccctcggtgaccttgatcatatcgcaaactcagagcctcatcgactccgattgactctccgtttcgcgcttactccgcccttttacgattcgcgttttcctccgaacatacgaactcatcgctgtcagctgccgggtcgctttcccttcttacgccgatcataacgtgtctccgcctgacggtctgaatcagccttttagccgtccgtcataatgcctggtttcgcggactctttctggacccccgactatgcttcgggcttgggggtgctatacgggaagctgcagcagggagttgtggaaaacaaacaaattttggccattgcatccatgcgttcagatgcagaagagcagtatggactccgcatgggagacattgccccgagcgtggataagatgacggcgctgggattcggcaaggacgatggtgccagtgtcagaaaggtttgtttcagacgcatagagaccggagtgaagaaagactgacgtcgcgcgatcctcgttacaggcatacgaaggaatccgtaccgaaatggtcgaggcctccaagaaccaccagaagatcgccaacaatatccgcgaattggtcgtgtcgcccttccggcgttggagcgaccaacacgaaatgcgtgttcagtattcgcatgacgcgctccagggccgcatcaaggaacacaccaagcaggccgaactggtaaggaaactgcgcagcacttacttcaacaagtgtcgtgtggttgaggacctggaagaagagaacaaacttgctttccaagatcccgagacgagtcccaagatcaaggtgcccccgaagatcgttctccctgccgaggaagagcccgacgaagaccccatcgagttgggtgagcggatattcccaccagaccacatcaaaaaacttctcacccatatgcttgataacatcaagcttggcgaggcgaaggttcccattatcggcacttatcagaatgtatccacgggcgcggatattgcgcaatatattcaaacctacatggaggctgagaatctcactcaagtggagataattggtcaggatatggtagacaacggtcttctccgcttggttggaaatatgggcaatgtctttgccaatagctccaagatgaactaccagtggcgccccaaggttttccaactcaccggtatcccagaaaaaaagaagcctctcatgcgtgtcacctcagtggcgtcaagcgaggacggcaacggcagcgactcacctattgcatctgtctccgagatgctgtctggctggaatcccctcaacaacccttacccgaacgagacaccttcggagaagctccgaagggaggctttggaagctgatgaacggtacaaggttgccgttcgtaagcttgaccagatccgctgccggctggaggaagaagtcattggccagctcaaatacatggaacagtgcgagctagaccgtctcaaggccatcaaagccgtggttcttgacttctcgggtgcgatcagcaatgtcattcccaacctgcagagcacagtggatcatatgatgctataccaggaaacaatccagcccctaggcgacttgagatacctgctagagaactaccgcacaggtggattcgtacctaagatccaagcatacgagaactactatggttccgttgaaggtatagccttggtcattgcccagagatgaaaagttactaattttaacaccaccagaacaaaactttggtgtcgaccttgaagctagagcccgtgctgaccgcaaacgtgttccaatcctggtgaccaccattctgacctatctcgataaccgtaaggaattcatgacatacattcagattctggaccacgctcacaaatcttgcaggctaccctgaacttgaaggcgatgaagcacgacgaatgatctggttgaccgaagttgatttgggcacgacgcacaagcttcgtcaaattttgaacaacagcaaagccgattatgccgaggtgttgcctcaattcggaattccagttattgcaagcgttctaagattgtaccttcttgaattgccaggttcgttgctctcttggtggcttgatatatccttatgctaatccccggatagactcattggtttcctcgcaagtttacgagatcgtgaaaacgatttattcgaccactgctcatgagaccacggaagaagggcggatcaaggttctccaaagtacccttgggcaactccgccttgtcaatatcgctacgcttgatgccattatgactcatttcacgcgcctgattgatttgacctcggccgacgaagaatacatcactttgttggcacaggccttttctccttgcattctccgccctcgcatagagagcagtctcactatgaacgagcgccacagctaccgtctgatccgtgatctgtttgctcacaaggactccatatttggcgaactgaaacgccaatcgagtgcgctcggaatgaccagttcctcctccaaccgtccacgggccatcagcacggacgagagtaatcgtcgtgcggcgacggaggcccgccagcgagctattgtcaaccgcagccgggcaaccagtcctgtcaatcgccaacggcatcgacgtgaccgctcgagtggtgcttccgagataggtcggttcccgatcaacgtcagtagcccttcagatcgcagatctacccgcggcagtcttgatgtaccgcccaacaaggctctccaggccgaacctgaggatgctcctaccgtgaacacccaagttgccgagactattaccaacggcacctataccgagtctccttcttcagctgttgccagcagcagcacccactcgagctccccaagccctcctcctgttcctttcgaggacacagcctccgatgactccccaactcctactcctactccggctgcaacatccgccgagtttgagaagcgcaattcgatgtcccgctcttctgtcgctcgatccagccgcaagccaggccttggtagcttgtccagcttccccactggctcggctgtcggggccagggggnnnnnnnnnnnnnnnnnnnnnnnnnnnnnnnnnnnnnnnnnnnnnnnnnnnnnnnnnnnnnnnnnnnnnnnnnnnnnnnnnnnnnnnnnnnnnnnnnnnnnnnnnnnnnnnnnncggggcgcggctgtcggggccagtggcacagagagcaatcgaagcagcattgccgaaagtgaacccaaccgagtcactctggaggacaagcctatggacgactagttctgaggatctgtggatgcggaggaaaccttgtacagatcagactgggagcagtatatcgtgctgggaggaaacatgcgttattgcatcacattccacccacatctttgttgctccctgatcatggcggagacgacttggcgagtgacaatttggaacgttacctttatcttttcttgtcttttgtttctccttttgaacttgaacttttactgcatgcctcttaagcatgcatgcatacataccctgtcccttctgctatgttaccgcagaagggattgttcatctcccttttaccttgcctatgttactgctgctgtgtttttgccccttatgtttcctgatgcattcccttttttgccctcgtggtgttatccacttggtgtatgtatacctcctttttcgtgcatatgaatttctttctgtcctatatatagtactactctaacggtgtagttctgtagaatttacatggaattcaatagctaaaaagcgttttcatcttctaatctctttatgcctgaaattactgtctccactaaagtctggtctggattcggggcaagaaccaccgagctttagctctcattgacttggattttaacattctcccgaaatattactttagtctatgaacgtcttgaaaacaaccccagaatcagacagcaaaagtactttgtacgaataaccagccccgcatatcttccaagcatctacaacttgacttccacgataggatattccaagccaagcgcaacaagagaaagaacacaaaacaaaacaccgaaacacaaaacaaccccaagccatgctaccaaatagccaaatcccaatcgtggactcccacatccacctcttcccagaaacgcacctaaagaccctatcctggcacaataccaacaacccactcggcacacaacacagcgtaaacgaatatcgacacgcagtaacacaagccaacgccacacccgccctccgaggcttcatattcctagaaacagaccgactatcctccatcaccgactcaaccaagccacccaacaacggctggcaacacgccctggatgaagtctccctcctaacccgcatagccctcggcacaccaatcccaggcgagggccacgtcccgcacgacaaaacgctctgtctggggattgtgccgtgggcgcctgtgcccggcggaccggatgtgctgagcgcgtacatggagcaggtccgccgccgcactggggaggaggtttgggggaaggttaggggagttcggtatttggtgcaggataaggctgaggggatgatgctggagaacgggtttgttgctgggttgaggtggttggggagggaagggtttgtttttgatcttggggttgatgctaggtctggtgggttgggacagttgagggaggcggttgagatgatggggttggtttatggggggttggaggggggggatggggnnnnnnnnnnnnnnnnnnnnnnnnnnnnnnnnnnnnnnnnnnnnnnnnnnnnnnnnnnnnnnnnnnnnnnnnnnnnnnnnnnnnnnnnnnnnnnnnnnnnnnnnnnnnnnnnnnnnnnnnnnnnnnnnnnnnnnnnnnnnnnnnnnnnnnnnnnnnnnnnnnnnnnnnnnnnnnnnnnnnnnnnnnnnnnnnnnnnnnnnnnnnnnnnnnnnnnnnnnnnnnnttggggggtgggaggggggtgatggggttacgattgttattagtaggtttctttttctcggttgggattcttcttgctgactgctatagaccatttgtgcaagcctaaccttcgtttggagtcggatgatattcgctctcatccggagttccttgagtggaaggatcttgtgactgagatggcgagggcgagttctaggacttatatgaagctttctggggctttttcggagcttctaccgctacaggcggagtcagaaccggatttcgaggcaattgttgaacgtgtgcagccgtggacggatgttatttttgacgctttcggggccgatcgtgttatgtttggatcggattggccggtgtgcaatattggcggtggtgggaatgatgtctcttggggtcgatggagacgtgtggtggaaaaggtcttggaacggcgaggattatcgggggaacaaaagagaggtgtatggggatctgttgctttgcatgcctatggtatagagatctaggtataaaatatgaaatgcaaagccatttgctcggacttccaagaaaaataaacaactatatatatcctcattgcaggttaacaaataacccaccatcaaccagtagctgcgcaccagtcacatagccactcaattcctcacaagccaagaaaacagcgggcccagccaaatcccgtggttgacccagtctgcccagcggaattcgaccttccatataactccgcttaacagggtccttcatatcctcctcattaagctgcgtccggatagtccccggcagcagcgcattacaccgaatgccgtacttaccgagcgcacacgcacatgactgcataagactcaacacgccggccttggtgggggtgtaatgtgtctgctgggcaccgccgaccagagcggagatggagctcacgccgatgatggacccgcccgatggtgactgggccagtgccatttggcgggctgcagcttgggtggcgtagaatgcgccagagaggttcgtggagagtgtgtggttcaagagggaaggttcgagtctagcggggtcgttagagaggagaagaagagtgaattgtaaatcgataaatctcactctaggaattcagcgaaccgacacacgcctgcattgctcacgaatacatctagccgaccgaatgcctcgacggtttttgcgacaaagttctggcctgtctctggctgcgaaatgtcgccggataccgtgaggaagcgggtcttggctgcttcggcttcgatctcgttcacgtctttgcgtagtgcttctagcagcgcgtcttcttttgcgccgccgaggtggctgatggagactttggctccgtgacggatgtaatcaagagcgattgcctgtaattgagttagtgtgtttttcttgttttcctgaatccaaatgagaaatcatacccgtccgatgcctgtgaggccaccagtgatggcggcgactttgccaactagtaattgtgggaaagtcattgaagatgttgagaatggacattgatcattcacaactctcccaattctcccattctcacttgggccgaatacgtgatttctcgagctcgggatttcgtggtgatgttaccccgagtgtggggaaaccccgcagtgtatccggctacgaagtacatttcctctttccagtagaataatgactagctagcaagtgtcgaaagcattatcgacccttggcccttggaagcttccttgttacgatttatacaggaagatttggagttttgacatgaaacgaaagagttcaactcggctcgttctcgcttgtgtatcgcaacgcgaaaaacacagaaaatcctgtacaatataatgataataagtataggaagggacatgagatgggatttcaaggatcctaaactccgatgtgtatgtacatggctctcgtatagtgtgtaagtaacttataaacatgaaatatatcacaaagaaaagaagcgaagaaacccctcaaaccatcaatattacgtagagccattggccaactcctcgttgtcgggtgcgcgtagggacttctgaggcgctggcgtaaggatagcggcagcagggatcaggggagcagcaggattgagctccagaccaaacccgggcttgtccaagatcgagacgtcaagatatcccttagtaggaatgggctcgttcaagaaaaggttaccaaacacaggctcgacagtgtggccatcggcagagttggcaaggtactcctggaaggggctattggactgggagacgacaaagtggtacgagtagggaccagatgcgtggggcacaacaggaagatcgtaagcagcagccatggcagcgaccttcagcagctcggtcattccaccaacccacatcacatcgggctggaggatgtcaacgttgcggccctcaatcagcttgcggaagccgtagcgggagtactcgtgctcgccggtggtaaacttgacagtggggtgggcacgcttgagaagcgcgtggccgtcgaagtcatcgggtgaaagacactcctcccaccagtcaatatcgagtccaatagcctcgcagcgcttgactagctggattgtgtaggggacgttcaaggacatgtagcagtccacgcggagtgggaagtcggcaccaactttctcgcgctgctgacgcaggtattcaacgttcttcaaaaggccctcagtaccctcgtcaggaccgtgtggcaatgccaccttggcgccgatgaacccggcagcctttgcggagccaggttggggaccggtgcagtaaaagtccagtcgggttcgagtagcacccccaatcagcttgtagacgggctctttgcggatcttgccctgcaaatcccacagagccaggtcaatgaccgagatcacggcgacgggcagacccttgcggccgtagaacatcgaggcgcggtacatcttctcaaagaggtcgttggtgtcgcgggggtctattagaaatatagttcgtcagaaagatccattgttatatgtatgtgagatggtgtacatacccgcgccaaccaggaagcggttaaaatgttgctgggtcagccagcatgcaggcgggcctccgaaaccagttgcaaagcccttggttccatcagtggcctcaatctccacacagaaagatcctaaaacattgattccccatgatgttcgcgaaccacggaattgtgcccacttgctcataggggtagcgatattgctgtcgaccagccagtggcctcccttgacctgtattgatagttagaatgttaaatttcaaaacaattgacatctcagagctcgtacattgtggtaatcaccgccagagccaacaccatcaatgatgaaggtgcggacttccttaatgcggggaaattccgttgttgaacccatgacgtatgaaatgaacaagtctaacgaaagaacccaataattgtttagacgaaaagataaagaaagaaaagcagagatccaacaattgcgggggggttcacgtctatttcaacgaattccagaagccgaggccagctcggggcattgctaacccgagagacggacaaacggcgactcggacaattttgtgacaacacatgtttggttgatttatgtcaggctatgtggagtggataaaaatgctcttgaggtcctacttcttgaagttcccgtctaaccattgtgtcaacgacagaaaacagcttgatctccgagccttgcgtccttcaaagcccgtatggctcttcaaaatcattgtaagaatctggagatctagaaatatgtcgctgcggccgctattggtaggtagttgacctgagtgccataggcctcacgggatgatctaaatcattcaagggcgtagttttaagacgtcgttgtaacagactgtaggtccttaagcagtctactcggagctggcggatttctaaagtagtatgctgacaatattggtagtaagtgtcatgaagagatagtagctgtcgatattcaattggatgaaattcgcttgatatgtacgtagcgagggtataggattcggagccacttttatgttgtatgtctgtataatgcccggttaagctaatgaataagatcgaaggcaaaagtaccaacgcccatttagatacagagctcacgggttgttttaagcaatagctatatggtaaactagtgactatggtagtaagacttgcaactctccttgactagggatttcggttgaactctttacgcactccccttttccagtataaaaaatgggaagatacggttacaaataagatcagctattatttactagatcctattcaaatatcaaagagatataagtcgaagactcgagccaagaggacaccaaaagcggagaatgcggggtgccccggtttctgcctgaggccttggctccacgagccgaccatttcggtttctttccctttccctcgggttggatgctaactatcgtggagaacattgcaaggctcccttgattttaaaatataccaagatattcgagtctattccagtctattcggacagcttgccgtgaatcggtcttgcatcatgctcggtccctgatagggcgaattgttatctcgctaaatcaaaatgccgaacactgcgtttcccgcacaggagacactgtcctccaatcagcaactcggtgacccatcccgagatcagagtgcagagtattcttcggattctgataatgatcatgttgaactcaatggctctacaagagccttgaagcgaaaacgccccctcactgtctcgtgcgtacctggcggctcgttcgtatggaacgtaaccccgactaaccctacctagatgtgaactgtgcaagcagcgaaaggttaaatgcggtatggtgtaaaaacatcctaaacggatattttgtttctaacatcgacaaacctagaccgagtacaaccgagctgtggctggtgtacccgaaatggccagctatgtgaatatagggaacgaaagaagccggggctgagagctggctatggaaaggagttagagcaacggcttggtaagttgctgtacagtctgctcgtcatctgtctcatgtctcactcgtacctcagatcgattggaaggtattatccaatcgcaagctcggcttatcgagatgcatattctgcaaagccagccttcaatgggtcacgaattagcccatgcagggcatctctcatatagcccttcatccgaaccgtcggcagtccacggacccagtcctagtactgctctttacttcaacgaccctgggtctgctgctactatactctcacgccgtgcggatgtctctatcaatagtccatcggatggctctgtgaggaatacctcacataataatctgcaacacgacttgtcaacggcaccagttggccagttggtacataacgaaaacgcacatcacgattattcaggaaacgaatcgtccctgaaggtccccgtcaatgtatactcaaatcaagagcaatctcttactgatcctgatctagatctgccaccatatgatttgctctatgctttggtagatctctatttcgaacatatcaattcctggtgcccaatcctccaccgacgaacaactctggataccttttttggcccatcgccactagaggaggcagaccgaatggtgctgtatgcaattgtggcaacaactctgcgtttttcctctgataacaggctaaatgaccagaacagaaagcgctatcatgactcgtccaaacaaaaggtcgtcctgtatggcctggaaaattcttccgtcagggcacttcaggcactcgtgattctagctcttgatttggttgggtcttctaatggcccaccgggttggaagctccttgccttgatcacccgatctgtagttcacctagggttggcggtggaatcaaagtcttctcttatcaaccccctctatccctcaatctatactctgagagctgtcactctttcggagccagaatcttggattgaagatgagagtagacgtcgtttattctggatggtctacctactagatcgatattccaccctggcgactgcgttcaatttcgccttggatgacagagatatcgaccgcaaacttccttgcaaggacgattattttatgaagaaccagccagttgagacgcggtggttccaatgctccagcgaccgtgtagactatctcagtaaagctgaaaacgttgggtctttcggtctctatatcgaaatcttaggtatcctctcgcggattcacctgtttttgaaacggcccgtcgatatcggagctctgtcggatgtcgcggaatggcaggctacctatcgcaaactcgacagtgacctcacatcgtgggagttcaatctcccagcggaatatgcttacgaaagttcgtcccgactcttcagtgggcccaagaatggccgggctctgcataacgattgggtgcaattacatgcaacctaccaaacgtgagtgggtcacatctttatcgttttgttctaataaattaatgaagcaattaatctagagccgtgattcgtctgcactcctcagcagcatacccgacaacccgatctccaatcttcacgccctcatatagtgccagccagcgatgccttctagccgtcgaaaacattctatcggtgacaagattcgttgtagagcacaacatgctagacaagatgggcccgcctttcgccttcactctctgggtctcagcacgcctactcctcgtccacggctcaaccattgcgcataccgtcagccccgacatcatgtttttcgtggataccctatttcagctaggaagatactggagagtcgccgagcgatacagcagcatccttcagcgcgtcctggacgagtacaacgagtatcagcaatccatcgccatagacggagaacgatccacaccatcaacagtcaagattctcgccgatatgcgtcgctgtgcattcgacctggactttttgatctcgcggcagccacgtgaatcacccgccgacaatggcatcggtgagagccaccagcccgggccaccactcctgacaatgcccgcacgaaacttcgcccccaacgaactcgagtacctcgacgtttttggtttctttaatgttcctcgtgttcctcctgcacgacctcctgacttatctacttctgcctcttctcatttggaaatcccagggtctgtaccaaatccgatgtcgattcatgggttgacagacgctggccccgcacctccgactgggtcagtagatgatgctggccatcactctaatgtgaacgaattcaacatcaccaactacttgattccgacgccggagacagattggctgtttcggccatcctagaggtagtgcgccattttcagtcgcttcttgcctagaggaccgaccaaaatcttcctccacatttttccactctttgctcttaagcactatgttgtatactacccaggttatactaggaatacccttaccaatatgccttccatgtgatcacagacccatttaaagtggcccacttaaaataaccttattctaaagagactttagcacaaccttggaacacactacggtgtccgcgggtagttatacaagccaaagcgagaaccgaaagcaaagatgatagttccattagaagtgttaactcctacaaataacataacatacatgaaagaagaagagaccaagacctcaagaaacaaagaaaggcaatgggatgagtgaaagcatgcaaagtccagggcctacaaacttcatcgagaacactcatttttactcaaacaaatttcaaacgtgtctatgacacgtcggtacgggcttgcatccgggcgaggacctcttcgaggaacacgtcgagaacagtatcaacaccaccgcccatgtcaacaggtctttccatatcccagtgttggaggctgttgaaagctcgggcaatgtcttcggccaccttttccagaccatggtggattcggacactgcggtcgaagtccttctcttcttctggggtagccgggggttcgttaggattgcgtccgggttcgagacggacgagattgttgcgacgccgatccatggctgcgcggagggccggaagaatcacagttccacaggcggtcggtcgctcggtctcagggggaggtcgggtggaacgcttgtggtcgctagaggtaggagtgggaggggtggagcgatggggcatagcacggtcatccatgtttgctggtgcgcgcttcgacttgagtccggaaactggttttgcgtgttgcagtggctctgtatgtcttggaagagcgacttgagggatacgtggagactgtggctggtgtcccacagaatcagcaacagcgcgagaaagtggagctggcgtgtgcaaaatttgaccagatgcgatgcgattttggtcgtgggggggaattctggagaattgcttaacaggagtgccctggttactgaccgcggagctaggtttggctgaagaagcagtatccaatttgccggcggagtgagtagctgcctgtgcgtattgttcgtttaatcctctcgtgggaagattgtctactgcaggtttgctggccactggagacacgaccttgcgtggaggaagtgcggtctgtgaggagcgttgcttgagaggggaagatggagcagagggaggaagtggggttttggtgggagaaacattgaaagcagggtttgctggggacacttgagcgtgtgattggggttgggatgttccggcttgtcggggtgtctcttcgcacagatcccactcttctgtctcagttcgcgtattggtgccagagcgcgacgggggtgcagatgtttttcccacaggacgaacggtcccaaaatcccaaaggtcttccttttcttgggttctggcttttgcggtttggtcggcttctctatcatcatactcatcatattcgtcctcgtcgtcttgaccccgatgagttatttgccaacgttctgcccgctcaatgagttccgtcaggtaggttgttcttttggcgcgcttcacaaacggatgctcaagaagctccttggccgatggtcgctccttagggtctcggcgcaagcacaattcaacaaattgcttgaacggcttactaaaatcgcctaccaatgtggggggcgggttcttgggaatcaagaacagcactttcatcgggtgaatgtcggcgtacggaggatcaccgcaggccagttcaattgccgtgatacccagggaccaaatatcggccttgtaatcgtatccagattgcttgatgacttcgggagccatccaaaatggtgtacctacaaaggtattcttcttagtcattgttgccgacagttgtcccgacacgccaaagtccgccaatttaacttgaccactcgcgctgagaagaacgttggcagctgcaatcagaagtgttagtcgtcgcacgtcgccatttcgagcaattgaggtcttcgtacctttgatatctcggtgtagcttctggtcactgtggagatagtccagcccgcgcagaagctccctcagaataatggcaatgtactcctcgtggataacaccaggtcgcagtagaccgtggcaactaccaccagcgcagaactccatgatgatccacaggttagaccctttcaagtatgagccgtgatacttggtgacatatggtgacttcagctcggacaagatggcaatctccttgatgatatcgtcgacatcatcctcggcattttcaacgtcaatgatcttgatagcgactgattctccagtgcgtctatccaaactaattgtccgaattgggtcagctgtttgttgaaccaatatgtggatatagaaggccgacttaccctttgaacaccttaccgaagcttccaccgcctgtaaaatcacgaggctgttagcaaacatatgaatccaacgacccttgaaggctcaagaattgaaaaacgtaccgatgcaagcttgcttggtgtaaatggtttccggatcaattggaggcggcattttggcgatttatcccagtcaccggaggatgacgatggacatgaattatgcttgaagctatcgaggctaatgatggaatgtcagattcacaaccggcagtcgcctatcacaaggatggagtgtggggttgagccgtacgtgacggtgcttgaaaatggactcggatggctgtctggggtgaaagaatgtcgctatccgatcaatctgaatcgattagataagatctatgcaatatctttccaggtcgcaagattctaggactgcacgggagagaaggaagagaagagaagacgttgttcgtttgggtgctaacaattgataagatgtcaactggtaaacaaagacaatttttcaataggagcaggtgcggcgaggggggtgatcgtaagattccaaaccgtttgtggcatagtcttcacgttgcgattagctcgtctcactccccgggcttctcagggatatctatgtcgtgagctgcccttgcttgtttatcgacgcggggggcttattttgccgctgcttatctgggggcggtgtatctatggcgttccaagtccagttacaacatttgaatattgtgcaatcatctgagacttgggtttcaggcttggagggcatcaaattattaatcggactcgattttgagacttgcgatgaaaacccacctatgtgttcacttttccccagaagttccaccattccaacttctaattcatccccacaaacgggaattcggatgggggcatatcgggacccgaatatctagtataagagtgaattgcataaattagaggtgctttacagacacaaaggcgaactatgtgaagctagctatgttctggggttgtatagctcagaggtttctatgttatacaacgtatgaatatagtatgatggattatatagatcgaaagacttcagcatgtaagaatcctcgtctttcatcccaatatcatctggtttgaaaggagtgattaaactatgtaaactagggcacaggaagcacccgtgacacaatccaaacagttccttattaggaacatcaaacctgtaggtttgactgcatttctcataggctaggctcattctatgaccgtaactatataaaagtacgtcccatgtcttccaagcgaaatgttccttgatccttaagtctgtcaagttggtactgtgtttattatcatgattcattgaatgctttccaggcaagcttggatactacgtatactctcacatcaaggtctcaaggttggcaacaacttgagagcccggtagattgaatgatatcccgaggaattacaaaaccaagcttgaaaacaaaggtgagatcccacgggatccaattcatttccatcaacgccgtgcataaaccaggatgataaaaccgaaagttcaagaaagcaagaggattactcttccagatatccaatcattaccgtgccattcttcaggcccgcatctgcaatgctcgtggtaagttgatcgatgagattgtgccccatgctattcaggtcaaactcgacaccagccttgtctgccaagggaggatcagccttaagccattcataaattctctgaacgggatccgacaatgaaaagcgccgaatgactctgccagaggggtgtcgaaactgaatgcgtgtagttgtggccgggtccgcagcaggttcagtgtgtggttggtcgctgggaatggacgcgaatggggaggcctccgcagctgggtctggttcatccatggtgacatcttcgtcgctggtagcccggcccttgcccttaacagtgtctgtactgcgtgtcaaatcatcagggtcttcgagtgtttgaccagcttctgctgcacccccaagactgttcctcattgccatttccatcatctcctcctcggtcatagcatcaatgctcttgtctttcttgtcggatttgcgcttagcgacaggattgcgcacattgtgattcaagctgtagcgatcgaggaattcgtgaagttgcatgagaaagtccgcaggcttgaccaaaggcggtccagaccagactttcatttgttcaccagttcgagggtcgacaatagcaatgtgggggtaattgtcggagacgtcgcttccctggaagtaatattggaggtaggaagacgcacgggggtcatctttcgagtactgcaggaaaatgaaatgttccttgacagtatcttgcactccagagtccttccacaaatcgcgattcagaacctgacagtcaaagacggatgcgtcctggatattgacaagcagccatttctcggtgtccttcccctcctcgcgcgccacatcccaaggcagtcgggacatgatctcaaagggagggcggtacatttcggcgagcatattggatttggacgatacctccgatgcgcccccagttacggcagcgagttgttcgcgacgagattcatcatcgcccgtccatatggaagatgactcttgctggttgaagattccggcccgacctaaaataaagtgttagtataagttattggaaaatttgaaaacacagatagcacccacctgatcttccacgagctcgtagttggctgagaatattggcgtgcatgtcttcgccactgtcataatccgccccgggccccaccaaagtctctgttgtccgcgccaacggcgctctcacctcatcgtcattatctaggccacctgggccaccatacatttgctcttgtaggcgtcgagccatagcctcatcgtcatcgagtgttggcagaccggattgttggggagtctcatcatcagtgtccgagtcaatattcaccacgtcggcatcatctgggataccagaccgatgagaaggttgagcaggttcaccagtcaagggtgcgcctccactttcaaagtaaagctgcatggcctgctcgatttggaactcagttatctgcaggtactgtatagccagctccggcgtggagccggtaatttcagtgaactgagctaccacgtcgttctccatggtaggcagtgtgctgaatgaggttccttgataaagatcttaatttgagagaagaaagtgagaaagaattgacaatggatacccactgaaagcttaggcgtagaatgaaatggggtaaagactcggagggtgatatgtggggagcgagatttggtgcaaaccgctgcaaaccagaagatcactaggtcccacaaaagaggttgtcaggaattaaaaaaaagagagatagaaaagaaatagaacgtccagcttcacgactgaaagaattcggtcatctcgaatctaaacgcacatgagaggataattgacacctgaggtggccagtgacgcggctgactaagtcttggagaaattgcacctgtggctgctacactgggccgtagctctacgcgcgacgcgtccagcgcgttgaccaggtggtggagctgccaattacacttcctaactgggctctgggaccttctttcctgacattcctcttttagctcccacggaaactacgtctattgttcctaccccgtcgtttttatagtccaagtcatggcaggaacagttctaggaaagcgcactcgtggtgtcgcggacccaggtaagatcgaccatcccaccttcctctgctccttatcttcaagccctaacccgtcttctagcattgccggtgcgaaccgccagcaagcgccgaacagttgctcctcgagctcaccaacaagataccgttccaacctcattacgacgaacaaggtcaactgtaaagaaagctgtcgaacaacctgaccaagaaaatggcgagagcaagacagcgtcggagaatgtttcttctaaacataccttgcgcgatgaccagttcaaatctccggtcaagatcaattcgcatttcaccgtctcgaaaccggtggaaggtaagttcgaaatttttgggtgttgcgcctgaggcaccgctgatcggacatgcagaagaaattacgaaacctatcgagttcgagttcaagacaccttcgaaatcgcgattccgagatgatttaccgcagtctcccgtcacccctagacatcgagtacaggtcggagcaaaggcagtaacaccgcgcaccccccgccatgccgatctccccccgacccctaggcagagtgccactccaaaaattgtgaactcggtgtattcgcaagctaggcaattgttcgcccgaggctctaactcgggtcgcttagtgggacgtgatgcggagcgggaaaagttgatatcttttatcacagaaggagtgaactctcggaaaggagggtgtctctatattagcggtccgccaggaaccggaaagagtgccatggtccaggaagtgtgtggagatctcgatctttctaaagtcaaagtctcgcatgtgaattgcgcaagcatgcgaatctctcgcgatgtctacagtagactcatccaggatttctgcgaggactcggatatgttcaagaagagcgaaggcgatcgcctcaaatctacgttcattccatccaagaaagggcaagatatgttcctggtcactttggacgaaattgaccatctgctcaatggtgattcaggggttttgcagtcgcttttcgagtggtcattgcaaagcaagtccaagctgatgctgatcggcatcgctaacgcccttgatttgaccgaccgatctctcccacagttaaaggcaaagaacctgaagccccgtttgctgccgttcttgccgtacagtgctgcatctatcgcaaacgtcatgaccaatcgtcttcgctcattactccctgctggggcagagtctgacccaaagcttgtcccctttgttcaaccagccgccatccaactttgctccaagaaagtagcctcacagacaggggatctccgcaaggcctttgagttgatcaagcgagcaatcgacgtcattgaacaggaaacattacaaaagttggacaagcaagctaaggagtccgagaatgtttcgatactaggagagaacaccaatttgtcatctcctgccaaagttggcggtgctccgaagccaacttccatgtcaagctacacagtcatcacggcaccccgagccagcatcgcccacattgcccgaatcacatccgcagctttcggtcaaggcactgttcagagactgcaaagtttaaacctgcaacaaaaagccgctatctgctctctgattgcgcttgaacgcaaacgccgccagttcgaggttccgagcacgccgtccaagtcgcgtacatcggcacccactatcaagcaagcatttgatacatattgtgcgctgtgccgcaatgacaacattttacaccccttgactgccaccgagttcaaagacgttctcagcaacttggaaacaatgggcttggttggagaataccagggtcgcggtcgaggtggaactgttgcaggtggcacggatctgcgtcgcacaccctcaaaatctggccatgctccttcgactcctcataaggcccttgacgagcaagctcttgtctgctttgtttcccagcaggaaatcgagagccagatcgttggacctggcgaaggaatccttcggcgtcttctacgcggcgagggactatgattcccttccctatttcttaagcgcatccatacagcatggcgaactttcatttttcatttcccattccctataactgcatagtcggggtcccatgcgagggcatttttatcatgtataacatgcttggagtttcattttggagttggaaatatccttgtctcatcatctttagcgtctttcaatcacggctttccttgttgtcaactctcctttgtctttgctcttgttcaaagtgaatcatgagatctctacacaaaaccagataaaaacacaaatgacttgatcaatggaattgaaactaaagagttttcgtagccctaatcgatattgtctcacggatcgacatgagtaagtcccaggttagtcggccactaggcatgtgatgctggttggttgggcatgactttttgccagactccacgagtcatattattgtcttatataccatctctatcgagctaagtagaagatattttgttctaatcgaaaccatatgagggctttcatgtaaaaagcccatgcatgtaattttatatagcacctgtataagatttatatttctaggaaataagaacaaaagaaatgaatccctgtcctctctagtatattctagagacaatctgatggtgtgtgtcattcatcatgcagacaaacaacgaatcaaacaataaaaagtacgccacctcgcatgaagacattacgtatataaactattcagcttggtttttgttctttctgttctcacaagatatcctgctatcagagacatcgggccctttgcgaataaccttcagcctacttaccaaatcatggcggaaatccaagcacaggtagaagcctctgctctcctgcctgatagccagcccaacgaccctcagccgaccaaggaccccgcagaagactgtaccgagaacggcagatctgttgtaccctacttgttagaaaatagtccagagttccgagaactcagtgatttgagacagaaggctagtcacaccgaactctgatattatacgtatatgattctcatacgttgttaacagggatgggaatcctccgaaggcgatcagtactttgcgaaacttcgtcgaaatgccgataaatccgacaaaaaatcggctacctacttttataagtttatgagagtaatcggacgcgaaattgacaaggccaccaatgccttcaaagcccaacgggttgattcaacctcacctgccattctcgacatgtgcatggcccccggtgcattcctcgaagttgccttgaaaaagaacccgggctcacacgctctggctttcagcttgcctgtctccagtggaggctataaaagtgtcctggcaagcgacttggatgccaagcgggtatttctcgatgtgacaatgcttgctgcggatatggatatggatctgatccccgagggccatgaagatgagaaatttttgccccggcaacttgaggaagggatgcttttcgatttggtcatatgtgatggtcaggtcttgaggcaacatctacggcccccttttcgagaaacccgagaagcaacgagactgatcatcacgcaacttgctctgggtctccagcaccttagacttggtggtactatgatcgtccttcttcacagacttgaggcttggaacaccgtcaatctcatttggatgttcagaaagatctcgtgggttcggcttttcaagccaaagagcggtcacgccaaaagatcctctttttacatggtcgcaaccaacgttgacagccagaacccggaggccgttgaagcggtcaagcggtggaagagaatatggcggattgcaacgtttggctcggatgaagagtacggcaaggtgaacttgtacgaagacacatcggtagaaaccttgctcaaggactttgggccggaacttgtgaagttgggaaagacaatttggaagacacaggcaaatgcgttggctaaagcaccattcatggggaagcagaaaccagagtgatcaatagaaggagaagggtgaccgagatgttattgatatcactcatcacaacgattgacttgaattgattgtttctactagcccactagctctcagtgtaaagacagactatgtagctctagacttgaatcaaacaagaagatcatgaaatccagataggtaactagacgaacctaatcctaccctcaagcaagatagagcatttgaatatcagagcgtcacaaatcccacgctgccaggaggattttgttacattttgatccacgggtgtcttgtgcttaagcaatcctgtgcacctggacaggcgatgtcgactcacaggttgatatggcaggagcatatgccttctaaactttcccatctttcttgtcgagcacaagagcttcaccttttgacatcttcacccttcgacctaatcatcaccatgactgcctcgattctgatcctcgttttctgcgtactctttgtgcccggttcaataattgttgcctcatagtaagtcattattagccatcttattacgcttccttcgcggactatgctgagacctcccaaagcatcctaattagcccgcttcaagcaacgacagacacggctcctcccacagtcgtggacaaacattgcagagagcaggtgattctgtatctgcttgagaattctccgtagataatcaacactttcggatggctggggatacggttctacctcgtgtggcgtcttgtcaagttttgcgtggacgatcttgtgaaaccccttgttatgtcacttgccacaactgcctacaggtaacgttatttgattgtctaaatttgatctcgaacctgcaaagctaattaccggcatagagctttcaatcgattttggttccggaatgatggcccccaatgaggaaggaggcaggcgccggctactataacgcccactttgccaaagtctccctagctccaacattcagcagatcaaacgtattatgatgcatcgagttttctgtatctataatggataactgaggaatgcctgtatcttttgacaaggaagaaaggtaggaacctattttgtttctgtgatacagttccccgatattcctgcagacattatgtataaggcttcatgatatgagatctaaattgcctcacgatattatcaagcagcgaagaatatcaatgcaacatttcccccccaaattcctctcacctcactatctccccgtcaattacgacccccatacccccacgccctcttatcgataaaccccactacgtctccggtatataaatccgctgttgagacccctgttatccctaccaaacctatcaaaaatggattattctctacagaatcacgcttcctatatcggccgaccggtctccgaacttcccacccctgctcttgtcctgagtaagtcggtgctggagcggaacacccagatcttgttggatgatgtcaaacgattgggaattgagtttcggcctcatgtcaagaccctcaaggtacagcttctatgcagtattagcttttaggaaatgcactaattgcattggacctgcagtgcatcgaggtcacccgcatgatgcttggcaacggtacgcaccgtcggatcgtcgcatcgacgctagccgagatccggggggcgctgggtcttgtaaaggaaggcatcctagacgaggtgagtaacagtaactatttcaaaaccaaagtgtagcagctaaaccatgacagtgtctctacggtctacccatctcagccagcgccttgcccttcctcgagactataaccaagtctctgaagattattctgatggtcgacagcgagcagcaaatagatctgctagaatcctacgccgccaaatcgtcttctcccgtagcaccatggcccgtcttcattaagatcgacgttggctcccagcgcgcgggaatggtcacagactcaccatccctccccagattaatccagcgcatcgagtcatcgtcggcagcgaccgtttacggcttctactgccacgccggacactcctatgcatgccgcacagaggatgacgccgccgcagtgctccagaccgaagtcgaaggcgtagtggaagccgccaaggtgttggtagacgggaaatccgatagacggatcgtggtgtcggtggggtcaacaccgacagcacacgtggtgaaaagactccagggtgcattgcccgaggggatggagttagagttgcatgctggtatgtgatgcgtgacaactagctaggtgccatactactgcctgaaacagaatgactgacacggacgctaggaaactaccccaccaacgaccttcagcaagtagcgacctcgctcgtggaaccgacacagcaggcggtgcgcattctcgccgatgtctgcagcgtgtatcctgatcgcaacgaggcgctcatcaacgccgggaccatcgcgctctcgaaggagacgagcgagttccccgggtttgcggttgtcgttgatcggccccagtggagtgttgtgcggatggcacaggaacatggcattctggggtgggcggagtcggatcagacacgcaggcttgttgcgaagacggggtcgaagtctggtgatggggagaaggtggaagctgcgtttgcggttggggacaaggttttgttgtatatccagcatgcttgtatcacggctgctatgcattatgcttattatgttgttgatgatgaggatattgttagggagacgtgggttccgtggaaggggtggtgattgtcgtggtttttagagtgtcttttttcgtatatacttgattgagcatcaatagaatcatgtatcattattaatagaaggaaatatatccgtactctgacattttaatctgtactttatatctacaagatctaaaataatacatatcgcccagtttaattagaccacttgatatagtgatagtagagttggtgaatagcatttacattgatcggtacatttactcagattgaattgaacatcggatataccctgatcatgaaatgagcttggtgtgagatgccaggtcgttcgaagaaagagtacattaaacttgatcacgaagaggaagaaagaagaagaaagttgcaaagtgggaagcagcctgttgatatagcaaacctcgaatatctcgcttagctatatagcaaacaatctatgttgcacacatcagatagtcgacgaccagtagagtgatagaacagacaatcatgtaacacttggcaatatctggcacaaatccaataaattcaagcaccccaacgcttcttctgaaagtgatatgttgaaagtgttgaggacattcttgaatagacatggcagaggtagaaatagaacgaatagaagagaagagactgccaagatatatcagaaggaagactactaagtatgccaccgatacttcgtcatcgctcaccgccttcacgaactatgcatgttaacagatgctaaccctatatcaacttccatttatgtcttttgatgtcttttatactggctttttatctggtttttgtactacttgctatgtgggtttcaaatagaagatttattactagttcaacaccagaaatacctaccatgaagcacactactggtagagtattgctaatttaatttattgactttgaatatgatagacaagttgaagcaattttgtctctttacctataaccggatgactataattccgccaggcaatgatacttattcgcccgtggaactacaacacatcgaatatatccagagatataaaaaaggtgagattatgaagaaagatgtaaaggcattatgtacaggagaaaagtgaatgggtatcatgaaacttggctggaacaagacccggaaaatgtgtggcccaactgttgttgcgtggccgattttctttccgtcgctggtatcacgaggcccgtcgttgagatgggaccgaatgtgagaagtgaacaggatcaaatccatgaagacaaagaaagcaataaattatgatagaacgcaaggcgttgtaactgggaaatgttttgagttgatcgtggggatcgttaagtcgtaatgaagaatgataatcaagatagctgattaatcatgttcaaatttttgatattttattggttggaggactcaatcgaggcggactcaatcgagggggcccgagaaggggtgcgggatggaataggcgagggagcaggcgactcgccggtgacaaggtcgtcagtggtgaagcgcggcaaccggtcgtgcgtagagccgtgcgtggactgatcggaagaggcggtggaagagcgagtagaactgttgtccaatcgcaaggactctatgcgctccaggtcggcgtagtcaggaagtggagagccgttgtagtcttcaatgaagctgggggtaccatcgggcttggtgtaacaaggagggctggcgggaacgtcctcgtagattggaggcatttcctcgtcccagctaatgccaagaccaccacgctgtgtgacgtggaggtggaactgcatgcgaagcacgcgcgcggcaccggttggagtgattaggcgggtgttgccattagggcagaactcctcggccacgataagctcgatgacgaggttgtgcttaacttccagaccgccaggggcctccatatcgcagacggcattggcagccgggttgatgttggcatcgaactgcatggtgatctcaccaccagcggtgtcaaagtcggtcttccagccggtcttctcctcgttgtgtccgatgacgcgagtctcctggtgtagaacacctttgccttcaccgccgatcttgtgagcgtgcttggggcacgcagtggagacaatcttctgttgctcctcgatgcgccacatcatctttcgaagacgccagcgggtctgggtcttgtcgcccttgtcgaccacgccgctcaaggtcatctcgacggggaagtgtccgatagggtaaatgacggagggcagcacaatgcggccagtgaggttggttggaggaaagatgcggatagaggacttgtcgggcccgggaagcagagaacgactgatgtccagaggcagcttgaggttgtaatcctctccggtgacgctccgtgcatgtgccagcaggaagtattcgacctggcccagcacgccattgcacgaggcaggaaggtggccggggaatagatagctgaatgggaagtcgtggtccccgccatcaaggtgaaggtcctcggtgatgaaattccactgcgtcaactcttcggtgcgagtagcacagttggagcagtgattcgagacaggcttcttggtggttgtcttggagacgagacgtacatcaaactggctcaagatgactccaccggtcaactcagcgactgcaatgcgcaagcgtcccgagaacaatgcgccggtagagctggcaggtggaccatagcagaccagtggtggcgactcgatcaggacatccagcttcgccgctggcgggtgcgcatcatggctggagcgctccttggaacctcctgcacgtccggaagtgcggcgcttctctttgctgtggtcccggagagggtgaatgaaatgatccattgagaatgatagacggcgttcgggagatcgtgcgcgctctgccttgtgagctgacttctttgtgtgtccggggatctcattgacggagagagtcgaggaggagttggagtgattgggagttgaggtgacggaggagtgtagcgaactggcgttcttaatcaggttggggattagacggcccggcatattggcgactgggttgtagaggctcaattgggagtggggtgatagttgtatgttcgtatgttcaggaagcagtgcggtgagggaataattgagaagcagatgaggcaatccaacacataatagtccctggaagtatgtaggaaaaagatctgcagaagaaagtcaagttgttaagtgcgcgacgtgccgcttttgaatggcaagaacaatcatgtgctaatggactgaacccatggaaaactaaaaatgaaaccccaaaacttgaattttcattctttttccgttctttttttatttttcattgctgtttccactggccaggtaccggggcagtcaatgagaaaaagaaaaaaaaaagaaaaaagccagccggtggggcttggaatagcgtcatagtggggtctgacagtacggatacgtggtaataacacttaaaaatacaccgcattcgtgattttacccctccaaggtcctattttgatgcatttgtttgttattctgagatcatcctgatcaaccaagtcgcaattttgatgcactctccatcacatcatttcatcttatagtttcaggtagcggtctgatgccgagacaaagagcatgaactgtcattgttagacgtttatattcccatggttggaatacaccttaaacccatgtacaatcgacttcataaccatatatctcgcccaaaatctagcatcgcctgactcaacttctaccccacatctcaaatgatagtctcggtatcatgcttcgatcaaagagaaaagaacatcagtaaattccaggctagaccccatcagggcagtcagagggagcacatgatgccacggttggctccagccttagcgtagaacccgtggacaaccgtgcgtaatgactcacgtatctacgatgtaccggttcggctaaaccggtcggatagtgatggcctactcggcttggtatacggagcaccgagtactgatggtatacttcctttagcatgtgggttgcccgggttcaatctataacatacagcctcgaaacttagctatggcgaatgtgaccaatatgaccaataacaggagggaaccttggaggataccccggctttagattatcaatcacttcatagccctcgcgaactactaactatacgacagagatgtgatcaggtgtctatgtccttgactcctagtatgttgtatcttaccttgaaagtgccacgacgacactcctgcaggtatataatgtttcatccctttccaatttctgaaaatactcgcctgtctataaatactctgaaatccagctatactaagccatcacgtggcgtgatggcgtagaatgacagtaatagactgcgcagtggagagtgtccagacctgggtaaatgacgaacaataccatacacagccgttaccataccggtcatgatctcttccagaagatcttcgactagcgctcccctaaataaaatccatattttccgctttgggacaaccaaacgcgatggaaaaggaccctttgcggagctccacccggaaaatttttcgtttcccttttctcctgttgaccgcctgaatgcgacggagggggtgcagtcgtctgatctataaaagtggactatagttaggggcgggcttctctaggcctcggagctacgtattccttcctcgaggtcacgctcgtatcctgtgcgcctctaccccgcactgcaaggattgcattttgcgggggtctgagcaattgcgagatcgaactccctcgacaagagcaacagaagtgaagcaatatcaaaatactgtatctatcaaactgcgatttacaatgatcgtccaaaacgttctagcccttccacttgtcaagatatgctccgtgctcacaaggtcgcccccctgacgaatcactatccccgccgcacacactaattacctaacagcaacaacagcatcaggagttaaccgctcacgtctcacctatgagcatcgggctcgcgcgcagggtgcccaggcactggagctgtagcatgtagcacagacacgttgtgccatatgcatgcagggagcttgaagcattgcagcttgtttggctacgtcgggttagaattcccgactcgtccaccctcgagccatacaacatacaacatacaacatacatatatacggagtacattatagggtccatagatgtttcctcggagcgccagggttctgtagtgagctgacggaattgatcacgccatggcatttgttgtctttgaaccgggctcggagacgcggatgcggtgatgccatgccggttcttccttgcagttcctcttccttgtacttccgggcacgtcagcccttgatgcattgcagtcggtgatttgcattgtcaagctggatcaacctaaataggcattatgataatatattacgcaacgtggtcctgatctgagtaatactacggagtactccgtactccgtcagtatttagggtagtaatatactagtgattccaacgcattatataaagtagctccactgtctcctttccctaggatcattacggttaatatgcttgattcacggctcggaaatcacgatcgcaaatcagtggctgtcgtccgccggtcggatggactagccaataattgctgctaaatgggacatcggcttctcaggcgagctgcctctttcggggcgatctcggattgccccgatctgtttccgccggcgtatgatccgcctttttggggctttgtttttttcgacatttaattgccggatttgcactccttcgattgtcgggaaagagtaggtactaggtacaaagcacatcgtggagaaaacgtgctccgcacattgaaccatagatcatatgggaataacgccatctcgtcataatcccaagtggatataagtacgtacctaagcagaggcgatgtgactacgggcatcgtactgtaaagccttacaaattacctcgattttctgcattttataagcgctcgacaatagctggactccgcataaatcgcgccattttaaaaaccgcaaactagagctgaaacgaactggaatgagaaaaatagttccacggacaatggccggggctccgctcaagcgcgggaaagcagaaaatttctgttcggtcatccactcagaactttatactcggcccgttgcaacgtgatctttagcctcacctctgcgcggcccgctatggtaactgtcatccctggttcagagtcccccctgggtgtttctcctggcttaattggagcatgtatagtgcgctgtacagtcgctccaccgtcgatggggcggaaaccgtactttcaactttttctaggttatgtgttggaggctagttggtcgtctcttggggtaacaattagctaacctgtagcttggcagtgagacgttgttatgagacccggcccgttagccggtctgatagtgcagtggcttcgatttggctggcggtgtggatttcatgtgttggtattgggctaggctcgtctatcagaataaagaaatatatacggttttatagtcgctggtcaaagcgatgtaacgaggagcataccaaaaagaaagtagcttcagtgttcaatccttgctcgtctcagccttttgtggcttgaatagactctaaataataccttttatatacatatcgattcttatcagatcttgcctgaaggagaccatgggttcaaggggtgtaagatatttcaattgtctgaacgtcttctctgccatctattcgcaggcgttgcattattgatctatggaaagtgaatcaatatcaagagcaaagcttccaccgtttatccggaacggcggtttcgaaaaacgattgaggtcgtaacttcgaagcaaagaagtaagtctgttgagttgatagaaagaggtgttatcgaaactgttggcaaattcaacatctgatgcacggagaaagtgtagaaagaattggtctgactcaaggcgtttcccaatgagacatataggtgtcacctggtaccgatgctccattgatctgatctatagttacacatatgtggtgctccaggctaaggcctgctacactaacctttgccttctaagttctaccttgagatatctatccatctcatcgttataatccatcaccacttgggaatcccaagctgatcttgaaggaagtgagttgtggtctacggacaccaaccccgaagatataggcgatatatacatcgaaggcttcaaacggggaataaagacattccaacatgagaaataacagacagtgacacaagacaggctggcgatcaggggcttagaacctctcaacgggagagtcgggtagcgcagtcaatactcaaaacgaagactgcaagctaacagaagatgaggtaggggaagagaggaaagcaaatccattgaggcaataatcacgtcactccccgacaacaaacttatgttgtatagtttagcatgttgaatcggggtcagtctactttttagatccttttgccaatggtgaggcatttgatcttggttgcgctctccaaaaatagttattgactagttaactagttagttatctggactgattgactaagggggtaaaggaggagctcttcaagatatgtatgtataccgcggcgtcgtgcataaatccgacacgtgacccttccgagtgtggatggataggaatcacttgagcttcccctattcggatgcaagctcaggccaccgtgttctttttttggattgtttcagcgtcactatgggcttggctgttacttctcctcagaagtagttgaccgctgtatcaacacgagtgggatgattcgctgttccccaccatacacatgtcttgactttggtcgaccctgatccacccgataaacaatttcaccacataacaattaagcactgcattgcaccaatctcggcccaattaccatacctaccgtattatcaccctagatcgatcctcaatccttcttggaacacgaagaaacggaaccacgaggcgtggaaccccggaatctccagacaactcgtgcaaatccgacctgcaccaattgaacacaatgtcgacctcattcaattggaccgcgttagcggtagcaataaccgcagtcttcatattctggaccttctcctcaacgtcctcctcacccttcacacggtccttcccacgcctcgaaaacaagcgcatctgcctcctaatcgcacacccagacgacgaagccatgtttttcgcgccaaccgtgctatcactcaccaagcccgagctcggcaaccacctaaagatcctctgtctcagcaccggtgacgcagacggcctaggcgagacgcgcaaacaagagctccaaaaatcagccaagcacctcgggctgcgcagcgaatcggacgtcttcatagtcgacgacgtgaaccgtttcccggatggaatggacaagaactgggacgaggaccagatctcgtcgctgctggcctcggctttcgcgccggaaatggcggcccagaagaagctgcccggcaagcgtgtcgatcgtgataaggctcctgccgctactatcgatgttattatcacattcgacaagcatggtatcagtaatcatcctaaccaccgctcgttgtactacggcgctgtgaatttcgtccgcacgttgatgaatgataagcctgggtttacttgtccggttacgctgtatacccttaccacgacgtcgctgtttcgcaagtacgcgggtgtgcttgatgcgccgctgtccatgttccttggtgtctggagtaacctcattgctgggttgacgggctcgaagaagaagggtgcgcgggctgaggttggtcctgcgcggctgctgtttgttagctcgataaatgagtggttgactgcgcagtctgccatggtcgtctgtcataagagtcagatggtttggttccggtggggctggatcactattgggagatatatgactgtcaatgaccttcagcgggagaaggtctagatgactgccctttccttgttcctgttttggaattctgatgctctggatgaagagctagcttcgtaactgtgctgcttctgcccggatcttgtgtcattttggccgatcgcctttgctcacgcttcatgtctgcatatgatctctcaaggcctaggtgccttcttgtatactcatctctactattcggcttacgcagctcatgtctcgagagccttcatgatggacatacatgtcctttagtacggaaaaagtccagagacgaaaaaaacacgaagtgaataatcatactgcagatgaaattgtacaattggatatcatgaatggtggacatcaagcacaaatgcttcaaacgatacaaaagaaagccccggtcaacaccaaggattgctatcccgccagaagatagaattctggggtttggcatcaaagcctagggcatgaatgcgaccataaaaccctgccgaagggttgttctcttgcgacaaaggatgatcttcggggtaatcaaccctcgtcttgagccttctgagcttttcctttaattctttggtgtgcttgacctggaaggagtagatgcgattgagcggcgaaatggacgggtccagctgcgggtactcataaagcaagatttcccagaatatcctgtcatcgagaactttgggctcaactggatggaacagttccgacccatttgggttccgccgcgcatgaatgcggccatgcaggctcatgtggcggctcttggaatttgtttggccttggaaatcgactgttccaacatccccgtctctatattcgtacctattacgctctggcaggaagtctttccattcttccaatagcataggccgttcttggagttcccagactttgagcgatatgtcgttccacctctttgtgatgatcattgaataggctatgcgttgcatttgataaatctgttggaagacttcgagccggaggagatcgtatgtgttgatggcttcagcgagcaggggacaccgtagtagtgacaggtctggtttcacgccattctctcgttggtacttgattggatcccgcactttcctatcatcgttcgccggtggtctcatgctgtccaaaactggctgcagacattgcacaaccaaatctctcgcttccttcctttttgccctcgtttggctcaagacgtcatatgccttacgcatgtctgttttgcaggcctccaggtcgccgtccagtttgttggtttgggtcatatatcggtacatttgcagagtcgcaggaacattgtacggcttcgtcgtcaatacctgaaacatctcgcggaccatgtctcttggcactttgcccgttcgcccatcttctgcctgtctccgcttgtgttctttggatagagtaaatgtcctttcaagcaactcggaccagaccttagctgaaatggtgatgttgtacgaggaagccatgaagtcgactgttctcgtggcggcgtatatgtcgttgtttgtgccaaaggcatgagcaacggcgaaaagaagacgctcggttgggtacagaccggaccaagtctcatagggcgtaacgggcggcagcattgagtcgtccctctcagtcaagagggcatcaacatcaacattccatacagtcttgaggatatttttggcggcttccctgtcgccaactctggccgctgcgaggaggatgttaatgtatgtctgctcgtccccagtaagcccgtcctggctcatttgactgaatatatccagcactgttcctttgacactgttccacgccgttgcaaagccacgccatccaggattcggatctaccatgcggcgctttttgtagctgtgagggatgatgcgagtattgtatgcttcttttcccacataacaatagttccagaccaatcctgccatatagtgattatagcacgctgtgtcgggagcgacattgttggcatgcatcccatcccaaagggcattgacgagggggccatttcccatcgcctgagcacagtcgaagaggtgagtgtactcggctagttgaggtggatacccagccacggttcgatactggatgatcgtgagcaagtcccttgtaaagtcatcgaacaccgcttccaatgtcttgagtcctagcatcaacacgccccacccgtgcagtgtatggtggagatctcggtagggtatcacgaaatgagccggagagaggaggtgcagggcttcgataaacacggttggcggcagcgatcccactagctctaccgaccgtggatcagccatggcttccctcacttggtttggttgtccgttttcaataactcggaagaagttcgccctgtaccgcgcctcctcttcgggtgagatccattccggtaaagggacttgtatttcattttcgaaagtcgcaggacgtggaacagcgagttcgctggtccgttgtcgacttgttgtagtcaattgccgtatggaactatgatagcaagtttgttgtgttctttgcgcaaaaacatcccatgtcttcgtatttggagatgccacgacacaagcaatttgcctcgggccactgagatgaaggtatgggggaaattgtgtgggctttctgatgccggctccaggacgagacgagacaccccagcgagaagcgcacttctcggtaagtgagaactttagcatggggaaatgatagcgaggaatcagtctttaaaaaacaaaaaaaagaaaacaaagagcacaaaatcacaaaacgaccaggggcttgaatgaggggaaggtgcgcttcgaccccggatcttttgacagggtacttcatgcaagttgtgattcaaactaagcacaacaagtacaagacccctgtacaaatggttaggcgagactgtgtcagattacatgattctatgattattacatgtggttattatgtggtcaactacctatatcgcacatgtacagacatccaattccattgatccacctctatacatcacccctgggctgtctagatcgcgtgtggatacttgcaagacagaaaacccggggtaattgctgactcagcacacgttctgccaagcgccacgctaagccacattgggtaccagccaaagctcgttgattctgcgtgtggaccggcacttgacccaaatccaatcacccttctatcatggccgacaacgaagataccggcggtccatccgtctcagagcccctggatctcgttcgtctctccctcgatgagaccgtgttcgtgaagctgcgcggtgaccgtgaactcaagggccgccttcacgtaagctacccccaccttgcaatcttcagaataactactgactatggtacgtgtgtacaggcctacgacagtcactgtaacctagtccttggcgatgtggaggagacaatctacgtggtggaagaggatgagaacgaggaggagactttgcgggtatgggatcatatgaatcagagaagtttacgcgggcataggctaatctaggttatcggatacagacaatcaagaagcaagaagagatgcttttcgtgcgaggtgagttggagcaattatggaatatcttgggtgggttgctgacttctacctaggagactctgtcgttttgatctctccccaggcatgacgagcttgatatgcccttgatatagagcacggcgtccagcgacgggaacaatactgggaaggacacgagataccacaaaatgcagtcaacatagataggtaacgataccatggaaatcgattatgatcatccatactagtcccgttggatatagttggatatatatccttggaagctagaggaggctgagtattccatatgcttcgacattcttcctagtagatttatattgagtcactggtgagccctgaagtctgcctgggcggtcgatgactcaactggtgactccgacttatcgataaagctccccccatgcccctttgtaccttgtactctcaaccggaatacttcaaatattcacttcagtctcttttatcttttgttcattgagcaaaagagaactatgatcactcgaataacacttcaacttcatatcaacagtaacggtggcccgatccaccgaccaataacgtcactaccccaaaaggcggcaccgcgatcagtcaacggttgaacttctcaactccacacaatgcctccaaccgggaaactaagctacgaggagcgaaaacgaggtgaagtggtatgtgtctccagggaatatgtgataagtgcctcatcttatgctcttcaacttaggctctcagtgaattcgccgagtatgccgataaacagcaagcccaccgctccggccaagtcgcacccagcgacagcagatattccaccgccagtgtgtcgcgcgatctagaagatcatgcagagctcgacattcttgatcagctagggctctccgatgccccccacgcggccaagctgaaggagctcctactcggtacaggcgatgccgttgaagacagcctgcaggtgctagctgggacattacaaacacgcattgatgaaggccatggggagaccatcttcgatcttgggttggaggatggtggtgaatccatgggcttcgacctcgatcaatggaagacggcgctgcagcgcctgcgcgaggcggccgagaccatcaccgcccactgccgagtattgctgacctacaacgtcggaggccctgaagaatcacctgtcacgcatggccgagtacatggcgcttggggcaaggtcctcgtgcgccatcaccctgataccatcgaggaaatggcggagctccggattgccgtagtggggaatgtcgatgctggaaagagcactacgctgggagtgctggtgaaaggtggtctcgacgatggacgtggtcgtgcgcgaataaatctattccgccacaagcacgagatagaaagcgggcgtaccagctccgtcgggttggagatcatgggcttcgacagccgaggtgaaatagttagcaattcgcaaggccggaagctctcctgggaagagatcggcaagcggtctgctaaggtcatttcattctccgacctggcaggccacgaacggtatctgcgcaccactgtcttcggtatgttgagcagcagtcccaactactgcttgctgatggtcgctgccaacaacggtcttatcggaatgagcaaggagcacctaggtatcgctttggcccttaatgtgcctgtcatggtcattgttaccaagattgacatctgcccgccaaatatcctgcaggagaccttgtcccagctgaccaagattctaaaatcgcctggcgcacacaagattccaatattcgtcaagaacatggaggaaaccattaatacagccacgcaatttgtcagccagcggatatgtcctatcttccaagtgtccaatgtcacaggagagaacctcgacttagtacggaccttcctaaacatcctgccccaccgcggtcaatatgaccccgatggggccttcgagttcctgatcaacgacacattctctgttcctcacgtgggtacagttgtcgcgggcgtggtcaaatctggtgtcattcatgccggagactcggtcatagtggggccagactcactcggccagttcaccaccacagtcatcaagtccattgagcgtaagcgtatcccggtgaatgcttgctttgctggccagtctgggtctttcgccctgaagcgcgtccgccggaaggaagtgcgcaaggggatggtagtattgaaaaagatggatgcccctccaaaggtgtatcgggaattcgtcgcggagggtaagtcgtcaattcaggttttattgaccacatgctaatgaaaatagtcctaattctttcgcatgcaactaccatcaagcctaaataccaggctatgcttcatgtcggggcagtcagtcagacatgttcagtcatcgacatcgatcgccctttcattcgtactggagatcgagcgttagtcgcatttagattcgtacagcgtccggagtttttagcccccggggaccgtgtcctctttcgtgagggcaaaacgaaaggactgggaattgttaagagcatcgattatgacccgaccaaaccgttgagtgcaaatgcaaaggagggagcttccacttctgcacctacgatacctcatgattagatttactgttgctttactttcaagggagattctttgttcttctttctttgttccttcacgttttgatattttccttgctaagcgttcagacatcgaatccttttgtttggattctatttgtgttttatgtttaccctgttaatacactggtcaattggctatgagctggctagattactgtagttctattattactaccttgtgcatctatttgttgctacttgctgtagtatgaggtcacatgatatatattgcttgacgtcactctatgacatacgcccagaggatcgccgctttcttacatatgtagcagtccagtttatatcactggatgatcattcgcaagccattgagcgatcagtggaattatatcgggtcttacgaaagactgggggtccatgtgcaagccaccgtggcccaacaccactgacgtattgaacaacgcggcctcagcctgtgggttcttaaagcttgacctgcccagagcttctaagcattcagcccactcgccacttacatttcgagtataccaaacaacgctttatcccaccctgctattatcatcctcctttacttagtatacttcatctgttgtcctatcatcctttcaccaaatctctatctatacccattcgacatctgaactataccaacacgatacaatcatggagactgtcaccaaatacgtcaacgctgcttcgactgccatctggggcgagaatgactccaataatgcccaacagcacggcgaagagcccgcatccggtgtgcaaggccaaggacgtatcaccgacccctatgatggcggcaaccgcgatggtaagtacaatagttataagcatatgtttatacaacctcaaagcacataactgtccaatatatctaacaatccatccacagagcaacccggcgcaatccactcaaacgccaacaccgcacccctaaatgcccacctggacaacaatcaatcaaagcccgaggtcactagcatcactaccccccatgcccctagctctctcaccgcctgcaccagcatcacacccgctctgcctgtctccgacggccctacagcagacagcgaagacaaggaaaccaagcccatctccagcggatctatagcagacagcgaaagcaaggaaaagaagcctgtctccaacgactcaacagaatccaccgggagcaatgatgacaacagttctaaacaagaacagcgcagcacttcacaggctgaaggtggcgagagcagcgaagctccccacacaagccgtacccatgacgtgagcaaagaggcgctcaaaggcccgcagggtcctgcgccgacgcctgctgaggacttcgagaaggagtataggggaaagaagcctgcagctgaagatgaggatattgagaccagtatgtttcccttttcctgttctcgctttgtcgtatttggtgctgacttttgttatagattctccaagtgaatctagcgggaagtcgcctttgaagcctgagcgttctcctgaaaacggcgagaagaatgggaagctctcaaaggtgaaggagagcgtcaagaagcatcttcatcattcgagcaaataagagcagcgtctttgtttacatcggatctatgaaattgtgattgtgatgatgcctcagttactttgacttcggatttgcctttttggaattttgaggtcatgtctatattatgccggcttgtctatttgacacgccttatttcgttcgggtgtattaatatccaattgtatttcaatcatttaaaatcttctttgtaaatgtgatgcaaaaaaacaaaatgagatttctagggctataaattggaaataaatggtaatttacatttcaccaaagtccaatctcaatctcaaatccacacacgccggagcagggtatcccaagtgtaaacagaagcaagcaaccattcggccatcgaaacaatcactcgaacaacattttcaactcttcaagtctgttcttccctttgtcagattcactatcatcgccgccaatcttcaacccaagcgagccagcaatattcattttacgctcttgcacgcgcagcatgcggccttctatggaatccttgaccacgaatcgcgtcacattgacatcgcgtgtttggcccattcgatggacgcggtcgatggcttgtgcttcaattgcgaaactccaccatggatccatcaggaaaacattgcttgcggtggtcaggtttagccctacgccgccggcacgcagggagatgagtaggactgtaggggctggcgtcggggatgagggagagctagactttgcaggcccgcttctccctggggtatcgtcttccatgtcgacgatgtcatcgtcggtaaagctttctgctttggtaaactcggctagaacagcggcacgggccttttggggcatcgagccatcgaggcggagatgcgagattccgactttggagagctgtgggccaattaaatccaagaaagatgtgaattgggagaagacaacggatttggtatttggagggatgcgtccgagatgattaataagggcgtggatcttggctgaagtatgggcggaaggagatagggggtatatgcgacggagggagattcgtggggcaggttgggagctggttggcggcgtgctgctctcagtgtcgtctccgaaggaaactgaatttgaggacgggtgtcgtactacttcaaaggtattctttgcatccactggggcacggcagttgaagcatcgtgccttgacgcccttgttcatttggtgttgcaagaagtcttccaggcatttcttacacgcactatgccagcacgctgttacagctggatcgatcataggctcttcacaacagatagggcactcgccactagactcggtttgaatctgccgaagagcatgggcagtgaacttgaccatcgttctagatgtttctcgagagtcggcattctcgttctctgccgtgaattggtcaatgagttcttgaagatccatgtcatctttgaactcattggttgcatcagccactaccgccgcactctcttcttctgcaacaatggctttgttgcgtgtcattatcgggtggcagcaggtctgacgaaggcggagaatttgagcgaagattgtgctgtaagacttcaataatgtgccagccacgacgttgtcattatatgttcgtttcgctcgggtaaatatgcagtcgtaaatttctcgttcttgctgagataactccacctcttcaatagtgactgtctttttgggcaaagggaccagtgggtcaccctccggagttttcatcgatttagttcgccgaagaacaagaggttccagtacactttgcacgacattcagggcccgcacgtattctttggattcgaatggcacggtgataaacgtcttccagaaggagaaattgctccatggctccactttgaggaaacgcaccaggctgaagagatcctcaaggcgattgacaatgggtgtgccagtcagtgcccaccggtgagctgcttttaactcataacatgatttagcagatttggaacgacggttcttgatcacatgagcctcatcaagaattactcggaagaattccacagagaatagacccccgtttgcacggaggcccggagcagacgactggagaccgagctggcggaattccgacaataccacaccataactagtgacaatcacctgtggagctgtttcatgattggattcgcagcataaatatttcaaattgacagccttgtccgacccgtaataaacaagaactctcaacgtcccagctttgagtgcctcgctttcccattgagagattaaggatgttggtgcgactaccagagtggtgtacggtgcatgcaccaccccagaggagattggcatcatagcaaggtcgttcaccgagctaataccattcgaaacctgtggatcaggctcaactttgtgagaatggaccagactgagcatctcaatggtttttcccagacccatttcatcggccaggattccccctcggcagtgttgctcttgagcaggaaagtcaacactgagatctcccgaatatgggttgacatagaaatggtcgatgtttttaacctgcggtaaatctttgtcgtcaacatccttcctgggccaaatgtattcctcccacaatggatgcattgacttctctcgagtctgcttcgagtctttctcttttgatatcatccaatgaagggcttgttgctggtacttgcgcagatcaagggtgaagctaggtgctggatctgccgctggcatgttgaaatcgaaagattgagctttttgatacaacgtatcgagctgaccttcttccagttcttcgctgtcgtctccgcctgatgagtcgttggcatccttatttgatttgttcttcacgttgtcatattgttctgcaatttcagcggcacgcaaaatgccatctcttttgtgcttttccgtagtcgggttggtcgaggtaggatgaagattgatttcctgaaacaacttcactagaccgacttggcgtagtcgcagattcttctcctcggtgctctccttctcttcaaacagtccagtggatcggttgtcatcagtgttaagagcattgagcgccgcgctttgaaaggcttcctttcgcaagtagactcggagttgtagatatatggtatcgttgactcgcaccttgtcgggtacaaacacacagaccccctcaaaccgacagatcttctgatcaatcagcgtagaaacccattcagcggtctcatgtggcagccttccaatttcttgccccgaggtattcgtgaatcgagtcaaaacatcgcttttgtgattgacaaatgctctgcctgttcggttgcgtttcatagttggctgcgagcgtgcgcgttcaatatggacagtgtctccatgcttgagaaatccgaagccacttctcgttgcccatcctcccacaccaaatgcgccaatataccttgctggtggctgatttggcagtaccgattcacttccaacgggtgtaccagggctaggctgtacacaaagatggggtttccggcttctggccggaacgctgccattgatccgtacaggcttcttccatgatccatcaaagtatatgttaacagctcgctcgatgttattggaagcagccgattgaatagttttgattgaatcggcaggtagttgctctcctacgatactagtgaaaaggtcgacatcgaagccatctgtgatcgtgtttgtggtgttgaccgttacttcctcgcattgttggtctaatccattatggtgtggagagggagtaggcccagcatccgcaatgggtgaccctaggctttccgtcgatcggacttgtgtatggtgctgatctgtttcgttttgcaaactaaaagggctttttggaatgcgttcgattgacggaatctcgtgtttcgggcaatgaggtagggacgcgtctgtatcttggggtttggtgggtaacggtgaggatggagagtcagcgaagaaacgctgtctctttgctgggggttgctctacatcctcgctcatattggctgtacatcgagcttcgtgaggaagaaaaaaggtgggctcggaggagacgcgccgagagacgcggcgagaaacgcggagagtacggcagccgaaatgggccaaattacagtccagcggatcgacgtcagtccctaagggaaaatgttcatggatttgatatctgcactgttcaagacatacgaattctctttctttgaatttctttaatttacgccggtttactatgattctctaatataattctcttattctccaattctgaggtggccagggtatcgctgacaaagattggccggccaatgcctttgccccgattacatcgaatcttttccccagagcttgtcgacatcacattgagcatgtcttttctcaggacagctcggccatgccaggcaaatagagcctgcagtttttatctgcaaagcgtccaatcccaaaaacgacactttagccggacacaatctatttccgcacctattaccgcagaacaagtccaaggcgctcacaaatattgcgttgctcttctctcgtatgaacaccttccttatggtcaccaaagcctactgaagctcccatggaaaattattcagaagctaacataattatctttccacagaaaatatgaccgcccctcctacacactgagtaccttcatcccacgacatgcgcaatccttctatattgcgctgcgcgcattaaacgtctccctctccatgatacccgacaccacctcctctcccacaatcggactgatgcgacttcaattctggcgcgactcagtaacgaagatccttgccggcacaccacccaaagaacccgtcgctatcttgcttgcatccgccatctctgaactccacgagcgcacgcagggccgcgcgcacataagcaagggttggctgacccgtataattaactcgcgggagcgaaccctaacaaatgacccatacccaaatatcgccgcgctggagtcctacgccgagaatacatactcgacactaatgtacctcactttgtcggcattgcccatggcctcgataactgcagatcatgttgcatctcatattggaaaggcagtggggattgcggctgtgttacgtggactgccgtttgttgcgttccctacgccacctgctcaagcgcctcctggggctgcgggttccgcgctaggagggggtgcgaaacaaggagccgtaatgttgcctctagatgttatggcacaagctggtgttaaagaggaggatgtccttcgatatggagctcaagcagagggtctccgggatgcagtcttcactgttgcgacacgggcaagtgatcatttgattactgcgcagcagatgttgaacaacctccgcgccggggaggatgtcggccatgactttgagcatgaaggcgaagagggtcatgaatacgacctttcccctagtgctcggagcagcgagtcaccactcgaagaggtcaaccgggcatttggcgttttcttaccggcggtcggcacgcgcatgtggctggatcgccttgaaaagcaagactttgatgttttcagcccggatttgcttcggtcagactggagacttccgtggaaggcttattcggcctatcgacggaagtctctggaataatggcatgtaggccatgtataatatgtgtaatatactacttcaggttttggaccgttgatgacttcttttgtatatgaggaatgttaaaactgttaccacgatgcaatgttgaacagtgaaatatacatacactgatctctgaaatcatactatcaacaaatgagttctaaatactgtccaagtgaaaagtatctgtacaaaacctgagaaggtctgagcaataaaatgtatcaaaatcaagcaaaccccgcacgcggcaacgcctttatacaatgattgggacagcgagctgtaggacgttcatgatctatttcttcgtcctctctcgtctctgcttcctcgagctaacaatcaaacgtcgctgagcaagcatgacagcgtagcgttgtattttgtcgcgcctaaagatgcaggttagtgtcggctgttttcgagaggaatatcagaactcacatcaggtagaaaatcgtaacgaggacgaacggcactgcaatcttccagaaatatcttctaaagtcagcaacaagtctagaagaaaggggtcgaaagacatacccttcactgtgttcgattcccgcgaaatgcgtgaagttcattccgaaataaccctaaaaatgttagaggattttcttcatagtttcaagtcatacatactgtcaagaatgtcataggaagataaagacaagtcacaagagtaagctgcttcatactttcgttctggtaggcacctgcacaggatattagtccgttgtttttctcttgaattatccatagaagttgaacgtaccaatagtgttgaaaatgaggtcaatcatgttatcagcgttgcgccgcatctgatcgtacccttcaacgatagtaatgcaatgatctagggcatcgcccaaatatgtatggcacatagagctgatcgtaacacctgtgcctccgacactcttcagatttggcggtacagtcccaatatgtgggcggggatcaagaaattctgcaggagttgcacctgggctaaggggattccttaggacaccaaagcctggtgtgccgacgggctcagaccggtgatcacggagagcgttaatcacagccactataggctgcatatggttccgcagaacagcaatctcagatgtcaaaatatataaggactttgactgttcaatgtctggatcagtcagaacctccagctcgaggtctccgatggcgtcttgataagccatcgttactggaatcgcaagatcaatcacagcatccagaatggcctgcaaaagcatactggcatcgcatgactgtcgaaggatagtctctggcgtattgaggcgcctgacaattggcgactcgatgtcatccgcgctcgtttcaaaaaaggaggtcacctcattatcggtatgtaggaagatcgaaacttgttccaaagtgacacataatcctttggcagaaagtgcagcatggcgttccatgaactcaattcgatcttcattcggaccaccgcgatatcgctgaagactcctggcagatgtgtctgtggtggccccaacatttccaaaatgggaattttgtgttgaattttgtccaagcccaggacgaacgctcgatccatatttcgccatatccttgcgctcctgttttgtggaggatctgaacctgaaaatgtccttcaatgccgccataataacactccacttcgtgggtcgcctcaacgaaatcgagctcttgtcactgaccacagaacttttccggtcccttgacttccatggactgactggattttcctcctcatcttccgaatcagaggagtcctcttcttgtatcttcaccaacttttgcaatgtcagtacaacgaaggcatggtccgagtaccaatccactttcgtgcggttagtgtcatggacaacatcctcaattgcaagccgatgcaatctcttatgatttccaagaatcttgatcacatcccagctcaacccattgacattgatccaccggcattgcacccagggctctttctcccgctgcaaaaattgctccagtgtgtcattgtctaactcatactgtcgcatttcatgttgtgagaagtccaccacggtgatctggcagcgtcgttgtaggtccgctggtatgttggacgaccattctgacgtgtatggcggtagcggcttggttgggtcaatgccgggttcggttcctggttgccaattgggatcttgtgcgaatccttcggggtggtatgagcgggcggtattgcgtctggctcggcgttttgtcgtctcggtggagttcactcgtgctgctgtggtgaatgcgggagacgcggctccctctctctctcctactgttggagcgacttgggaactgactgacgggcgacccgcctcaacatcgacctcgggtcgtgtcggaccctgctgtgcataatcgactgagtgtatgctcatcttcacggtttatatagatgtgcacatctaatcgtgacggtggaatgacgggttctcatcggctccggacttcgatatgctgcggctcaatgatgtgaacccggcccaggggttggtcaatgcctggtgggtatatacccaggatatttgtacaattggtgcacctctcatcgagacaccacttcgggggagaacatgttgatgcgtgcgggatatgaatgacgtcgaagagccgttttctgccgcgtcctacagagatagttaagacaaaaccggtcaaatggaaagactgaattttaacatgaaagataacaaagacgagaaaatcgaaggaacgaaagaaaagaataaatagtaaacaggaaaaagaaagaaaaataatagaagacagggggtttcccgtacacagggggcggagcgccttattttattttaagggagaggatggacgggcacagccctataagacactctacttcatacgcgtccagcataggctatggagtacatatcaggactcttgacctcattgagatagattcgtacaagtacatataagtacacgggttccattccatcacatcacatcaccatgcaccatacagtaacgccgtcccaatgctggcttccaatcactccagatataacaacatccacaatagttaaacaagatagggaaagcagagcaataattacagtaaaaaaaggctgccaaagagaatataaaggtaatgagaggaagagaaggagggagacagcattatactcgggctattgcccgtggtttccagggaggacggtggagtccaatttgaggctgtttattcccatgaaaactaggccgggagccgtggaagtcgggatagaggcctgactccatgtccatcagaaccgcccgctggggctttgccgagctccaattggtagaagtacctttcggtttggtagaaggggtgcgaggagtaggagcgatgacactagcagctgcgcgcgtcttctccttgatgatatcgcgaagctctttgtcatctttggtgatttgagctttgatgaaatcaatgtcattggaagcttggaaagcggacatgaccgactcccgtggagtgtatgggtatttgtcgggatttggaggcgactggggtgtgatggacgggtccaagaaagcttcctgatccttgtctaggagctgagtaatatccagcgtttcaccatgcggaattttgtgaggatgagaaggggtcacacagtccatgtcgacttctttgcgaaggacatggtcaatgtcgacggcggagaagtaggcacatgattgggggaggtcatcaattcctacttgctgagagaataaggcacgagtccaaacgttggcaatctgcaaagccattgcagcgcgatacctatcctcatctttgacaaggtagcgaatttcatcgtgaacagtgatggccaagcgggcctgaatgttgaatcgtcggataagatagtccatgctaacgatcaagaggtgaagataatcgacacccgacgactgaatagcccaattgattcgggatgtcatgaagctgcctttattaatgaaacgtcgcatgagcgcctcagtgatcccagcacccaaagcaggggttctaggtcgttcctgatccgcaaactcttcgagtttattgaacacaaaggattcagtgccacctcgccaaaacggcgtctcactcaagaggcgacgtgaagtgcgcgttcccttagtctctttgtacaggttcttggcagtctcttgtgtctgcttttcagttagagacggattgaactggcgaagtaaagtagcggcgaacttgacgcctgccccgtagattcggccgtagttgaagaccttggcgtcattccgcgagattcccagaatcgacgcacttcgtgagtgaagatccgtcccctcagctttagacccttctaagcacatgaagccgattgcgtttcctccgtgaatctggaatggggcatctccgacaagacttgcaatccataattcctgggagtcgacatcggctccaacgaacgagtagcccggcggtgctttgatcatagcttttagctctgacccaacacggttggccttcgcattacttgcagtcaaccaagtattttccacggcgcgtcgagtgatggtccccattggaatgacttgaggcagaataaatccgatacgattatcgccggcttcacttttctctctgcctttttgcgcctgatcttcatagaccacgatttgacccttgattcgatcccgggcgctgatccaataagaacatgacgcattcatatccagcgcttgtttggcaagttcatactgagatgacaggatcccacgttcgaaatactgcatatacccttttccaagcggattggtacacctagcttgtgggccgtccttgtgggggattttgaagtatatggcttttctatcgtctcgcaactcggtgttcttttcctcggtcatatcgcacatgacgactggctgattctcatactgtttgatttgatcacgaggaacgcggaaagtccatccgtgcaggtccgaccaaacaagaggatagttgtcccaggaaagtttgagcagaattggcgcaatgcgagtccgcaccgtcaagttaatatcggcggcgttggaggtaaaaagatccttgtaccacttgggcattcctggtttcttttgcctcgctgccggccgaggtggatcacccttcttctttcctttggccattttgatctcctggccggaccagtccagctgttgtagccaaggatcaatcgtgtaaatgtctggttggtctttatacttcaatgcttcgtcgcatagtgctagtagtttactctggacatcgtccagccgcttatgatatgtttcctctgcgctggtaagatactcttcccatgactcattgactggtaaaatgacggaggataagtgtcgaagagcaccgaaactgacgggatgcgggcaagtctcgagaaaattggggaaaacttttcggtagacacggtgggtgatggcaacatcggcagcacaatagtcgagaagttcctccagtctggccacaatagagtcacgatcaagttcaccgaacagatctctctgcgccttatcgatagtgacatcacaatggaatttggccacatcacgcagggagttcaccgagcttcgcccaacccaaagctcctcctcttcttctctcaacatgttgttttcgagaagtgcggcaagctccacagaatcgtggtcattcgcgattttatctctcatgtcctgattctttttgtggcgcatccaagtcggtctctgttgcgaacacatgccgttgaccgccacatgtagggacattgtgtcgagaaagaagttttgagactgctgcatgttgtattcctcaaggactcgggctcggtcgtaaccaatattgtggccaaccacaatgcgagattgagtggggtctcccaagggtatcagctgtacttgattctctgactcgccaagcagccacggtgatatccatgcataccaagctgtcgggcttaccgcgcaagccatgaccgcaaatggattatctttgtacatgacctcggtgtcgaatgttaacattgattcatttggggcgtcgacaggttcagaggttccgtcagtgtggtatttcgtccatccgctgcgttggacccatttgcgtggtttggccggacaggtaagagccgcatatgacttagcccatgacaggtatggttcggaagaatccattccaagtttgtagaagtgttcgtccaacgtttgtcccttgagagcaggaagatcgaatgcgataggaccggcgccattttgagatttgcccaggagctcatgtcgagctaaatgatccttcgagagagcgactagttctgggtccggaacgcgacctttgttggggaaaacttgagcatggacatggtcgctgagctgttggactccgatgtcattgaatctggatgaggaagggactgcgcgagatcagtaattgcgatttgattgttttcttatcgagaagcgcaaaagacagggcacccaccagaaagagatcgtcttgtggtcacattgtcggcggaagtagagaataatcttgtatgacttctgtctgactggtagcacgatggcggcttaaccaggaacggcgagcttcgtcgcaagaaagattccacggcacccttggaacaaggagtgcaggagaacttccaagataacatcctaaataagaatttggcaagtttaggtcatgttagaagtgtggcgacagccgtaaggctgcactagtagcctgaaaaaaaatccgaaaaaaagaggtaattatgaagatggacgtagctaatttccatatcatcgcctatcgcagatccgggcgtcatgcaggtcggaatattgttttccctgtatgcttgaccgccttctcctcgtagacacttttcacgtgatgtgacgcagtagtatccggcggtcacccctccattgactcgctgaccgccttccatttatagatacacaatacgaagcgggcttatctgatcccctatcgccacatgacccagttgataagacccatatgctggccggcattgtcgccatcacctgctttgatcgctgaaaggcccgattttgccgacaaatttcttcttcttaaacccacggtcgctgcattttgtcttagcgaaatctcccaaactctgaggctgttcgtcggccaccaatcctagatcttttcacaccctctcccacacggcagcacagagccgcatacgactttccttctcatctccagactattgccctcgctcaaccttaacgcaaacctctttgaaagagtcttccttcccactctgttacaatgagcagaaacagggctgatgttgtcgacctgacaaccagatcatcacggcgaaatcctatctctttatcctcctccccgcctgccgccccggaccatgcaacctcttcccgacatggacagtttactactacccgcggtgtcaagcgtcgccgtaattggaacgatgagcatgacggctccttcgtatccccttcggctttctccgaaaatgagcccatcgaaacaatcgacatgaccgacgactcaggcgcggccgcactcgctcgaacagcggccaaacagagggaggatgctataaaagcgcaggcttcagcggagagtgattcaaacctttccgctctactttcttataaatgtcccatttgcatggaaacgcccgtggacgcaacgagtacctcgtgcggtatgttcttgattccctactatactggatttaagcatgctagggcttctactgactccttatctttaggacatctcttttgtcacaagtgcattatcgactgcttgaagatgagcgagcagacacgtggcggtgactcttcaaaacaacacaaggggacctgcccagtgtgccgcacaccgatttcgcgaaaggagatgccggggaagtctaagaatctcattccgttgttgtttctaacaaaaaagcgaagtgatcttcccgtatctggcccatagagcctttatacccgcttccttggtctcttcaaatctttgtttttctctcgactcttgcggcattgggaatcggagcatgggcatgggtggtatttttcagggttttgcataagcgttcacgagctgggattgacaaatggagttccaaatccatggattccattgattaatatggtgtgtagatgtagttgtacctcgaactattatagtacaatattaacttctaaacagacactattgcatatcctttcggtctcttcttgcaggatcaagtgtattccgtcgacccagcgcatttcccaatcccccacgaaccattgcatcccccttcttccccaataccacctcaatggcctgcacaagggcattggggtcatattgcatccccacaacggtctccttatctccatccctggccgtggtttttcgtccatagagacgaagcgtttcaatgcccatatgtgtgagccgctcacggtccacatgcggtgtccccggaccatccagatgcaagatatgggtcacatagttggtataaggaagggctctataatttcgaacattttcttgcaccgaagtagtcgctgagttgtgactttgatgctgagaatgaaaaatcggaccccgtccacggctctcctctccggcgcttacaattgcttccacaaaatcagacgcgacaaatggtgcggatggaggccctgtttcccgatccaatgatccgttcaaaatgaggattttgtgtcgggcgggactggagacgatgcttttgccgacgcctcgcaggatgatagcagggatgattgatgtgtagagagatccgatactgtagataatagcctgggagtcgtttattgcttcaagcactcgcggatttgcgggcggtcggatctcttggccgtaggggttgatgtaccagatgcgagtgattcgagaactcaaatcttcattctcggttttactgaatttgatattcttgttgcggagagttgccagagagccaggaagatgatcctcctcgtatattgtcgggtccgacatttcggaatccgtgtagtcatcgtcgccatcggcaaggagcagacttggtctcctggagctgggattgtgctcgagggccgtcgcctcgcttggatgcgagatactattctgaccgacaatcacagttccatccgcaagcgatgcagagatatggtgggagaaattggagttgattgctgggatcacgcgcaccagatctgacgggacgccgcatatgctcccgagtaggtagatggcactttcgaagcttccactgaacagccgggcggcagtcaagaaaagatttccgacacttgcggaggtaaagtcaaaggttgatgatggcggtcgggctcgtttcagaatttccagatttaatacattgaagaatgagcgtatcaactctttcttggcgggggtgatagctgtccatagcccagacgtgccgtccacgatggactgccattcattggttgcgctgcctgcttccgcagacagccgatggttaaacaatgccttgacagctgacctctcagggtttgtcaacgaatccggaatcaagcgtaccaatcgacctgtccgacaagttagcaaggggagatacgaagtgttgggcgtaagttgtactccgaacatcgccaatcccagggccaccgaatattcgaatcaactcggaagaggatcccccgttatcactgattgggatgatgtagctaagtgggcaattcttgttttcacggacggcgttgaatacatcgacgagattgtttgccgcgctccctcctgatatgacaacaatccctctattggtcgccatgggcagatatttgttctgtcgcttgtgtccaggtgataaatccgatggggagggacaaatgtcgagtgaatattcagaagagtgaaatttaagacattggggacatgtctgggcccgaacgcgcaacaatgacacatttccacagccacaacacaagaacggccaactttgcgcataaatagtttgagcgtttagaattgaaaacctcttttgtgaataattatcagattcaaatgggtctacaatacacgacttctagtctgagctatttatagagtcggttgactatggtatctctacataggtagccgttgatttcttcggtatagttgtagacataccaaggtcctatgtgccatattctcgaaatattttaatttgggctttgctacgagacaaacaatgttgtggaatgttcgtatcgaacaagatcgtcgacaaccattcagtatcttcaaccctatctttcctgtagaccgacgattccgtaaatttgatgatataagtccactaattccagactagacatgaggagtggttgcaaaaggctactttcatatcaatatccccctttaacctggcaagtgtatactgagatgtctatatctgtcgaataccaggctttgcacccacttgtatcacgatcgatgtagacgccgagaagaagctcgtccgaaagatcgatctctatttgatgccttcagtttttattctttacctgttttcctacatggtattttaatctatcatatcaattgccaactatattccgctaaaagtaccaggacagattgaatattggtcttgcaaaaatcgccggaatgaagaggatctgcacctcacatcaaatcaatactacactagtgtgggttattggctatactatctctggcgtaccatccaagtaagatgagagcctttgtgtcttccacatgaaaagcgctaagactagattcagcataattctctctcggactcgcttatcagttttccttccagtaatcacattcgcatggggatctattgcagccttaataggtgctgtccgtcatcaaagtcaactgatagctctgaggttccttcttggagtcttcgaagcagggtttagtgtgagtgactctatggatgttataaatccgcttttaaatttgataaagccagccgtgatcttcttaatttctacatggtatcgaaagaacgagcagtagattgcttatacaattatacaacagcacagccttgaatagcgcttactcgaagcagatcaaagcggttcattatcttcctaaccgcaggtatactcccaggagcattcgggggagtaatctcaggagctatcacatcgacattagatggcgcacacggtatccgtggctggagatggctcttcattgtcgaagggctcgcaactgccgggggaagcctgatcgtccactggactctactcgactaccgcacagcagtcgcgggctatcccccgaagaacgaaagctatcccaacagagactcctcgaagacggaatcgccgatcaaggcgactcgaaagaccagaacatctcgatcttcgtgcttttgttcaaagctctctcgaattggcaaacctgggtactgatcccgggctacatgaccatatcgggagctggggctatttcatacttctatccaacgttgattcacgagatggggtacacctctaccgccgcgcagtatatgacggctccgctctatattgcgtctctggctgcggctatccctatttcctggttggctgaccgcaaaccccatgctagggcacaactattgatgggagacatgatagtcgggatggtgtttttcgctcttatagcgggcattcgaaacaatactgcgcgatatttgtttttgtgcttcattagcatgactttttggacgggaagcgcgcttgctctttcgttttctcctacgtctctggcttcataactgttggagcgcggtaaaactaggcacaatgcttcgtcttatgctctcgaggggtcaaatgcttagtgtttgaacagacaaacaactaggcggtcaaatacatgagatcaaagtgtatattcaggtctggaatagtcaatttgtctggtctgatattcagtacaatctggggctttctttatagcaagcaaacattgcggatagctcggcaaatactgagatcaggttgatctcataactgactagatgatttcatgattttttgatcagatgaagtcatgacttttatcagatgagatgaaacagaataaatagtgcaaagtaagcaaacaatcaaatatagaacacaaattccaacacaccccttcagattttgaccttagtcaaaagctgcaattatgggatgaaaagctaacatagatcaaacattgtcaaactcagtcacccggttaggtaaccgtctcaaattcagctgattcaggaattcaacatgcttttgggacggaaggtgttttgtcaatccgtcggcgatcatattgtttgtctgaatccactggagatatatatctccatttcttaccttttctcgcaaccaatgttgattgatgtccacgtgacgtaattttgtctgatatgatgaattgggtttgatcatcagatcaatggtctgtttattgtcacatgatagtatcagatcgttttctgggtcaaattcaattgatctgagcaatcgtttcgtctaaagtaggtgctttgctgcctctgaaagggcaacaagttctgcttcggttgttgatgtggtaacaattcgttgttttcttgctgaccaatcaattagaccaccgaaaagggtgaaaatgaagccttgagagctttttcgtccaatgttatctgcaaaactggcgtctgatgctgcgcgaaagacgtatttaggatcacatgacccgtcgaattcaattgaatgatatctcgtcccataaaggtacgatattgtttgttctgcagcgatcacgtggcttctttctggcttagtaagccattgaaaaaggatctgatgtgcaaatgcaatatctgggcgtgtcattattgcagcaaaaccaattgatcctaccaatgatcggttactcgtgatgttcgtgcgatcatgctcgcgtggatatttgccgtcggggctgtttgttatggcctggtaggtattttgttcaagcgttatccatgaaagtaatatgataactgcgaagatgtctaccttgagacattgaattgcaatcctcatacgcaatggaatagcaggactagatatatagttgacacaacatatcaatttcatacagccgtttattataaatcctatccccaatgaaaacagctaaatatcgtctatgtcctctacctgtacatgcatgttctgtcctgtccagacaagacaagacacaatctttatcaaaatttaacataagcatcggaataatttacccgagcttggattcgtgaaacaataggtccacgcggaatgtgctccgggtattccaaatttccatcgattgcttcagttcgccaacgtatgcgatttcgtgcttagtgagtcacctgagcagcagcagcgggggcggaagagctaccactgtagaggacaagcagaatgagaacgcaaggcacaccgatgaggacggccttggtgcgggcagggttgctgcggttgtactcaccaacctggaggcgcacatcggtaacaaggctctggcacttctcagcaccgagcttgtagtacaccagaccagccagggcaatagagtaaccgaagaactgctgagcagtgacggggtcgcggaaaatgaacatggaggctccgaccaggaggatatccttgaggataccggccatggtcaggacaacagcagaagtcttgccaatctattggtgtgttagaagtagttactatctgtgggatgaaatgacttaccagcaaaacaacagaggcgttaagaaggaaagcaaccagtgcgttggcaatgagagttccgataccgagaccgtagatatcacccatggtaagacggggagcctcagcgaaaagggtgacgacaccgttagtgatggcgcaggccggggcgtagtagtagagagagaccaaggggtccatcttgaactcagcggaactgagcaaacgctggaccatgacaagacgaagagcctcgaagacaataccggcaatctggactgtaaggttgttaggactagaatgtcaaatatatgagtaggacatataacatactgaggaagccgaccatttcgaacttgatctcgccgaacgaggcaatcacaacaccgacaacaatgagagccacgttgccgagagtcttcaagttggtaggagcgattccgaaagcccaggtggccaacagggttgcaacagcgttggtagcctagagaatattagcattgagtcgaacctagcgtttaagagtgggcggagatcgcaattgacgcaattgaggtcaacccccggttcaaacgcaccttaagcatctggatgaaggaaacactcaggtagaggtatgccaagttaccgcagatcagactcaaactgaacatgataccgataggcacaatggcacgtctgcattgcacaaattcaccggttagcgatcgagcattccggtcggactgcggccgtcctagctatttcatatcttatcggagttgctcacgtataggtggccgggttcatagggaccttgtggcgggagtcaagcacggtagtgaaccgggcgaggatttgggtcatcgccgtggcgaacaccatgtgccaggtggtcaagaagagcgctggtggctcatgtcagtaattgattcctccgggtgcggttgaaactcgattggcggatggactcacggaagtctagaatcaatagcggttagctgcacagtccatcatgaataggggatcagagataaggggtccatactgaacttggcactcgcaaggacccatttgttgaataggatgacgctggaactcagagcaatccacaggctagagagtcgagtcttagtttcatacccgacgaggccttcacgtagatgttacgtacgcaatgtagaagccggggtggaggccgttgtccttgggggcaggagcaccgccctccagcttacgctcatcctgcgacgagcgaccgtttgccatgatgaaagttaaaaaaacagtataaaagaatgactgtggtgagtaggaaaaaaaagaggtggttagaagggaagataaggggaagaaatgatttatgaacgatcggcagttgaccctatggagacgctccagcgcgcacttccaatcacaacgtcggtctaacaggtgtgtcgccccagtgtttacacgtaatccccaagccctgtcgagctgagtcctctaagagggttccagggttattggggatcgagatttttccggtttatccctgtcgatcatagcacagcccacctcgaagtcttcttttcttgtctagcgtatcacgtctgtatgaggccaattagggtgatttaaagtcgattgccaagaacacagggggaagatgtagtgagacaacgacaaaggaaaccaatcacattgaaatgtgcaaattatactcggtacatatcgatagagtctattgctgtatgttgaactccgtacaatctaagacataatgtacgacgtacggcgtaggacatcctgacatctgatgctgtagagtacgttgcacttacacgatcacgtgacagggatagatagattttccgcgtccacatcattcattacctaagacatctcctccgaggttacggatgttccgataaacaattgtacagacatcgtcacttccaacatgccagagtcaaacgtcgcggcggattccaaaatcgaccatgctgcctccttaaaatactggaacagcgtgccagccaccacggccagcatgctgggcgagttcccttcagtgtcacgcattgatctacaggggtctaaaactttcctagccaaggtccgccgtttactacccaaagtccagtctgaaggcaaactccaccggggtgtggactgtggcgctggcgtcggccgggtaacagagggcttcctgagccacgtctgtgaagtggtagatgcggtagagccggtagccaagttcacacaagtgatgaaagacagccaattgaaacgagacggcgtcattggaaacatctacacgcgtggccttcaagactggatcccagagaagaaatacgatttgatctgggtccagtggtgtgcgggccacctcaccgattcacagctcattgactctaccgtgcggtgtcgcaaggcattgactgaaaacggcctgatggtcttcaaagagaacttgtccactcatttctccaaagaagatatgtacgacagtgaggatagcagtgtcacgaggaccgatgcgaaattcagacaggtcttcgaggcggctggcatggaggttgtcaagtcggaactccagaagggcttcccaccgtctttcaacctcttgcctgtgcagttctacgccttgcggccgaagacgaccaattagccctcgatgccttgtgtctatcatttgatccttgagagtccatgatgcaatattggtatctacggattcattattacttatcgaacgagtaattctttgcatgcttgcaaaaacctggaatttccgctctgaaatgcgtagattcatatccttcaatcgcccaattcgcatggaccgttatgtacataataaccactttcttcgacggccatggtcgtgtgagaccaaatcaaaattcatacagagcgtctgaatccgctacagaaaagggagaaaccttaagtcgtccaccagaaaccacatccctattcaatttctccggtggagtccacacaacctccgcaacatttgttcgcggccgagacacaccacacccagtatcatctctatgatgaaccaacaacaagtctggccgacacccctgtttcacacataaacccgaataggacgcgagcccgatagccgccctggctcgtgtcgagacacattcatagagtagctcagcatccgcctgacttccagcctggtagattcccacgcccaggcaagccaacgataacggatcgggcaaaccccatggcgtaaatgaattaccaacattgttcaccccaatcactgcatccagatcatatttccggatcatctctaggacctgtagagtgcctctcggacgatcttgcggaggcttgcagtctccgctcgttctgggaggtgacgccatgtacatatcgcttgttggcagacccacgaagctgactgaaagttcattctcgtggatttcagttgccagtcggacccattcggtctccgtgagtagtgtcagtcgtgtacaatgaccaagcatgacacgcttgtctgttgagtggatagtccagcttcgttgtttgagggtctgtaagacatgccagaccagagcctctttctttgaatcgaggttgtaatcgagatgaaagtcgacgtgtttgttcagcttcaaggcacgatcaattgcccattcgatgttttgcttcgcagcctcagggctagattcgacatatggtgttgtcccaataacatcgatttgcgaatatttatgaagagcggtttccagaaattccatattttgctctccgtattcactagagaatataggatcttgtgcaaaacagacgatttggatatcgcaagaatctttccattggtttttcaaagcaacagcggcttctagacaaatcagctgcactgtatggtctacctccacaaatgctctcattgcagtaacacccgacgcaacggactcagcaagaagccactctcctcttctaatgatatcagaatggctgaattgttgtttggccttggtcgtggaggacaaagcctcctgaaatgtgccggctgtaggtagaaatggggcatattcaggtgcgctgtggataaaagctttatcgaggtgaatgtgagggtgtaccaacgctgggagggctagaggagactcgaaatcatccttagtagaggattcatgcggggtcacagaggtgactgtgcctcgaagagagtctctagggtatccaatctggatatcccaggtggacggctctcctgccagtcgaacaccacgaatataattaatctggctcgttagtcgtggcggagacatattcttgtgcaagtgaagtgttgtctgagttgaacgctttcccgaaatcccccgcagcgcgtggggtttacgggcttactgataacacaccgtggacttctttgaaatgacaatatattcaacaggcttaaaatggtagtctcgatgatcttcggcacatttaaacccacaaatatacatgcaaatgcgaatcaacaaaatactatatttacccaagtatagaccgagggactctctactaagctccccgaactaatactcgcactttctggcggattgtcttcaacatgctgacgactgtatccgcggtctcgcaatactgcgcccatggttcaacgcattgaattgcttccttcactagctcatcgaagtccggaacaaggggctctaaagccggcgtggttttcgcagtcgagagagtaaaaatggcagccaaaattctagatgtggaaagtaagtaaacttcgcctactggaccaccttggaccggaagatatgatcttacgcttgcattcgatgccagtttgagtgtgttctctgcatcataagaagcgatgccgcccagatgaatttgcgacagctatcaacgcacttcttgcaattcgcgaaaataaattctggcaatactgtactgccctggctgtgggcagcaaaaacaaggctcggacggcagatgatgtgttttgtggcatagtaccgggcgagaatgtaagtgtcgtaagggtgatctgcggatattgaattgcccagggttggcctgatggggtttgggagcgagccaaaccagtcctccaattgacgatcgagctcctcgctgattgtcttaagagatgtaatcgactgcttttggggagtcacactgggggtgtcacttgtgtgttggggcggagggctggtatggaaattagcctgatcgggttttgcatatagagcactgtgcacgcggttgagaagctttcgaatcgagcacatggcgaggaatacaagatggccgtttcggctatcttctgaaattcgaggaaagggcaatctatccacgaggacttcaataccactgggagggaaattaaattcggcgagatcgtcactgggcatagtttgttagctgaatgcaagataatgccagatagtatactaaccattcgagaatgaagcaggcccaagctatccgatagagactcgctcgctcttcgtgtgtgttcatgtcatgcagtctatatccaatccgtgtcaatatcctagcgggaaaatatatcagaaaagacactcactcagatatcatgatctgcacactaccagatgcttcacgaatcatttcccatgcttggattgggcgtcctatgtagcgcagatacaacgagccgtagaataaagctaaaggcaacaaatggtccgctgcaaaggacgttatcaatgggctgttcaagtagtgatatgcggaagcgaaatattccatcccactcaaatccttgtccgcttcaatatcaaaaatccgttgaggattcgtagagacctttccgagagccagaatcacgagataaagtgaagtttggatactgttgaccttggtgtacgttgagaaagtgtcaaaaagcatttgtaacagctgcggctcgacaatcgggaagaatgcatggacatgatggaggaactcggtgattagaggtttggtgacctgaggatgcagtcgggatacgtcgatttgttcaaaagcttgaggtatgcctgcggcctggatactgttgaatggtcgctttttctctatctgcttgaaaaagtcttgagggtagtcgccaaccaaatttttgactcgatccaacgcaaataggctcccggttggcgtatgatgaccgaaaggaatggtaaatgcatattcagagccgtaggtgttctccggtgaaaacaggccgaaggaggatttatcgtatacatgctccggtgatgggtcccagtcgtatttaggctgtgaggcatagatagaggaacttgaccgacccggatgatccgacgaagcgcctactcgggctgcgagctcggtgatggcgtccttctgttgctcgatcagggtttccagatgggtcaagcgaagcaggatttcagcggggatatcttgcaccctgtgaatcgtcactatctaggaacccttttcatcgaggtgacgctttctacctgtcgctttcttgatagacacactgagcccccgcatcggtgcagaggccacatgtcggcttctgcccatcgcacttccgtttcctagtatacgttagtgacggtccaaagcgaggaattaaaagcctaccgatgccgacagaaattacatgcgattgatgcacgcttccgtggatagtcgacgggagggcgagattcaaacgatttcatatttgctttgtgagcaatacggaagatcgacgtcaaatgctcactgcggggtcgtcagcaaacgccaaaacttagccccttaataatcaaacgtgcctagtttcatctgggcgccaaaaacaaaacgaagtgagaaattatattcatttaccgataagattttactcctgctagttgaagcaatcgatctgtgtgctctggcacttccagcggtatatatcgattgcgggggtcgaccttaccatctgggagatgcaccactccatcgcggatcactatgttctcatggggccaatgagttgttgctcggtaagaggcgaaagcttctttctttcgtttcaggctctcttccgtggctagctcaaagggggcgtaggatgcataaatcaccgttcggatcgtattgctgttgacggtgggttccccaccccaatgcaccgtacgtgaatcccacacgattaaatctcccggctccgcaagcaccttggatggtttcataccatgagactcaaaccactggatttcttccgcgctgaacaggcgcaggtccttctgctcccaggtggatggatcggtctcggtgtcgaagaactcctcggttactgtgtttgaccgcggaaacaccataagggatccatcctcgggacccgcatggcttaaattgataattccctgaatacagtggagcccgcgacgcattggcgactgatccacgtggggccatggtttttgagcaggcttgtcttctcggttgggcagagtgatgttcagcgcgtcaaacgagacgaggagctcatcggtaccccagatcttggaaaatgcctccagtacctttggctccatgcgagcatcccacatgaatttctcatgggtgactgaatatccattgaacgtattcactttgctttggaccggtaagttgtcattggtccacgtggaaggatcatcaaggtcgagggttgtgctgaaagatgtaagccagtccagagctttgcgctgatagtcctgggccttttttgggtcgatggcattcttaatgatcgcatagccttcattgtgaaggtcgtctctccaatcgccatatgggccacttagcctagcgtcctcaattagaaactgcctgctcaggagaaaatatagtcaactcactcaaacgaagactgattgagagatggagtagtggtagtgacagtggtcatggctgtttctccaaacagaacaagctttagtctgaacaggaatgtacaaaataacgggagcgtagctttaagtatgcgagattaatatcccaatgtgatacatcatcaatttaaagccagcacatgtggaaattcgcaatatgaagtccaatctgatggcctccttcggcgggtaagcgggtcgaccccgccaaagtcgcaagagcggaggtctcgcagacggtctaatcgccatcccacctcattctgagccaatcagccatgcaaatgaaatcaacagaaacgtcacgggttgggctcaaaagactccaaggatgacgtctcaaactatttctccacacaaatatgcctattatgtcgcggtcgctctatactcgggcccgctcaaggttgaaaaattctctaatcaaaggggtttgcccaggtgaacaaggccaaggtcaagtctcgaagcacttgcatatagaaatcgccagtaacacatcgaaataggccatgtagacggtttgcgctacaaatgcagcaaccaaaagaggcagtaaccaaaagaggcctcatgcagaagaaaacagatcccggatatattatccagtgggtcactaaccactactctcttttctgcttccatgccaatctaaatccaagccacgggacactgaaagctttctctagggtatattgcgagcagtgacccatctaatgcttacaaatctccagactcaaacacaggttcgttatgcttcacagacctgacactgcgttcttaagctcaagtatgtaggcttctgcctcttccatactcgttgggccgactacatcttgattcggtgcatccggcgagtttgctgaacctgtgaagtacacgattcataatcttcaatgtgatgttttgctgcctcgattgtaaggccactaatatcagcatctcgcaatttccgtctgcataaattggactccctccatctgaagaagaatgtccgctagctatcgcctctatccgagaagtcatggctctatgcaccaacagtacacgggaacgtatcctggctggtctcggctcttccacttcgactgtcgatttctcccagcgacccctgctgaatgtcagtgaccatccaaccgcccaacagcccccctcgaaacataagcacgcgtaatgtttggcccaggtgtggatgcgtggccgtggaattggcttcctcggcaagtgcttggctcctacctctgcttagccatgaggaattgcaaagactgtgtcagggcttggttttagactgtgagctgtcaatatattgctgaatccgtgtttggttgatggataatactcccttcatcaccaaggttgcaaatgccgaaatgagatgcaggcttgcagcgccaatatagaatagctcaagatggctggcaattgtcaacatcctccagcggaatctctctctttctcccgcataccagatatgattcattgttaccgtgtttctaaccttggcgcctgtccctcattggcatcggtcacgatataactcgtacagtgctgaacaatcccatatgtccaatgactggggtggtgtgctagttgaagagagggacgaacaggatgttcttccaaatctgattgtaatggcatttattcttgtatgccactacctgtatatcatatgatataggaccatcagggaaggtgcgatggagagtgtctattttgggaaggcacgtgggttgggaatataaaagggcccctccccccatttctcttcttctcttcttcctctctcctccacatctctctagccaccatctcaccgtagcccccacgagacagcgtcggcagaggatgccgtagcacatgctgcttcatctaccacagggaccatgacattaccatatgcacgaggtccatgtaggtctgcatcaaacatcaaactgggctttctcgtggacgttcctgaagtcgtggctctcattaccacttgacgagtcccacggaatacattaggggtgtaaatcttcgtagccgagactcgaaggtagtcacggcaatgaccgacgcttccaaccttacggtttcttttttgtgtatctaacagaccgacgatgaaggttgtaccattctccattgtttccccatgccactaccccagttgcactacccgtcgtcgcgccgtcgctcagctcggcgttactgttcttcccaacaccatcatcagtcgaagggtcgcgcatcttatcgatcaaaatctccatatagccacaactcggtcactctcactatgaatgcggaggatcgtgtgttgccagactctacctctgatcctattatcgattctatggagctggtgacttggaaagtgatagtctgctgggttggattgctattgctgtcaatactacataacccctgttaacatggctctctttttaggcccagcagcgaaagaaatgattgtgtacgctccagacctaacacctgcgctactgagactggcgacggcgcgtccaacaattagggccggcgagttcggggcgaacaacccattctctccatcccaattcccttccaaacagtctatatcgatttcgtcaccggcctgccagtctcccaccagagcttcaacccagtcgccttcattacatacaaattcacgaaacggctcagagcaatgaccggcaagaccacttggtcaagtaaggactgggccctggacgctcgcatacctacagatcgcagaactccttttctgtatctgcctcgacagtcggtgatgcgcacagtttccttccatgatccgggaacggtgccacacagagtatgattgatgccgtctctctggcagcttgtttgcagaatgctgggaaagagaatgtgccctgggcaactcgtgttcataacaagcttagatcggccactatctggcatggcaaagatatgtctaaggtaccatgacaagatactcatccatcaaaatcaacttgtgtgtacggagtacacgatcaatgaacgaatatgatacttgtatgatacatgtgagtataaggggtgttgctattcggaccgacctgcaaaccccggccagggtgacgatcgcggacttcggacttacagtgtaaactccgaaatcagccctagagtgccccgagcttattggacttaagatgcaagtcttaatggccacattccatggtcacgttgacggaagccgctatttcccagaccagtctttttggcattcttctaaaacaaggcacactgattgtattggggtcgcgttcccccagcagacggagccttacctccagctagagcgatacgtcaaccaaatatctccattaacgactcccctgccggaggccaacaagcgcgagacgagcccaaaagcaacacattatctcgagcctggaaaggaaagcaggacgtcaactttaacgaacagtccactaggacatcttcgatttgcacgacacgccgaaagtcagaagtacgagaatctttcgagtcgagcatatttttaaaggggcttgaatggaagctattattttgttcagtcacgaaataatctcaaaggaggacaaggcctgtaacgagactctgctgccgcaatttcagcgctgcaatgattgtatgtcccgtcccgtctttcgtctcagagtcggagcgatgtgggccgagtacgtgtcagaatatcaccactgtttgctgtcccctcgggtgtgagtctagttttggcatagatcgaccacatggctattgccgctatgccacctcgtaaatgttaacacaggtcacaagtaactagctaggtaggtatatacagataggctcaatatctatactgactgaatgatttaatgcgtattctaaactgtggacaatacaatctaacgttctttctctctactttgtagcacctgtgaacgaagttaattcgtatccgtgtcaggtggatcgggaaaaccaagcagaaaaagaagaaccaaacttacctaggaacttcttgatatcgccatatatggcgaattggcccgcagtgaggccaccaaccatgaacagacgcgtcgggagaccagcaaaagatccacgcagacccagctcaccagcaatcttgatcagccgagagacagtactctcaccaggcagacccttcgtcttgttgatcttagacaacatggtatcagcgggctgagacacgatggcagccgcgaaaccgctcagcagaccagatcccaaattcacagcggtcgaggcaccagctgacatttgagacttgtcaaattggctcaggatggcctctgaaatcttttcgaaagcgacgaacttggttattgtgtaaggaaccctatacatatgttagttgtagcttttcgtcatgttgttttcaccaaactataagggagtcttggatcgaatgaacgtactgcttgaaaaggataggaccaaagcccgagtaaagagcgccgacaccctcattcttcacgatcttcccgaaaccatcgatcagaccattagcaaagccgggtgtcgagacaaggcgaatacgtgttgcttccaggggacacagcgcaaccgaggcgaagaactcagcgcaaccagctgaaacaacgtaaacagcagtgttattctgcttggccttttccgcaccgagaacatcgatagatttctgctggaagaattcataaccgccgaatttgaaggcgccttgcatgaaatatcctgcaaaggtcggcccgaagcccgttgcaagaacgctgatgccttcattacggatgacctgtcggaaactaccaatcataccacggttgtaggtgagagggtcgagctggatccttgtcttaacactatgcggaaattcttcattttagtcgatgttggtgatggagctgaagctagagctggagtgagaagcaattgagagcacgtacacgtcgaccggagtaaaggcaccatgggtgacggagcagcccagtgcaccggcaagggcaaagcgagcatagaggttgatgccctccggcttgctattcgtgagctggggtgtggaaacaggagtggcagccattgtgatggtcgtgataatgaatgcgtggattaagcgaccagaagggtcttaggattatatataaaatgataatggcgggccacttgtccgcaagcctttgttatccctacctactgtctcgggtttaacgctattaaccccgttatttccagatgtccaatgctaagccgaccaccaatatcagttgcaaccttccttctcgcatacttgcagtaagatgacttgtttcttgttgtaactgatttttcacgcatcctttttctgttctctatctaggtacgcattatctcttcgcatttattaggtatctatcgtgctctgtactccgtaccctttataggtttagcgagacgtaaaccccgtctgattgcttcggcatagaggtatctacctcacaattttcatgccaatttcagttagcagatgtaggctgcggtaggccatgtcatcgaggcagccctgggggagtttcccaggcgctgggtcgcttctgcaaggttacgggccgtgccggtagacccgcagcagtgggtggggcagcccgatatcattgttgtcggtactcgagtttatggcaaatgcatatggccactatcaagtcaatagcaatccctcattttgagagagagagttcctttgcctcaaaccatttcatgtacttttcttttcccttcattatatatcccttcttcaacacttccattcacatcttccaactcattccgtcatctttggcctcgtctcactcttaaattacattcattgattgctatatattgggatcacttgaccttgtctatcaagactaccatatcttcctttctacctgtctatggtattgctcgctctttctttatcactatgatatgaacagaattccatgctgtcacaagcttagcttagtcatagcttcgtagcttccagcacccccaccaaggaggtcaagcttactgctacatttctggtagcaggtccaaccacggtagtcagcgacaacgccagaccaccacacaagccgaggcgcaacctaacaacgcaatcagcatcagctcttccttaccgtcttctttaccgggcactcctgaggcacaaagccaagttcacggagcggtagcgcaaaaccaggttcaccaagccgatagcgagggaaaaatcccccgggattttgtcgtcccctacaaaagcattatggaaaacctggaccgcatagggccagaaatcgacgatttgagacggctatacaagcacatgtctacatactgccagctccaacttcaatagactgccctaacggaaaaaattgaagccgttgccgccgccacacgcattacaatctctaaagagctcaacaagctgcccgatattcaggaccgagctatggaatgctgggaacaccttttccacctgcctttcaaagctggaactccgcattttccctcccaagctgaaaccccgcaagactataaagatcaagatgagatagcgtcagtcatcaaggagaagtcaccacaagcctcagcggaaacttctagattgctcaaaactatcaaattacagttccatattaatcaggactcagcaagcatgaaattacttattggcaatgtactacgagaatcagagtggagacgattcaagtaacctactcggaatccctagtttctgccttgaggcttgaagaatcagtacatattacatgcaaaacctatttttcttcaatagatgatacgttaatctctatgctctcatctttattcaattttgtttgttattccctcaatacttgcttgctttagctacacttccatcttcgtctgcaatgacccaactactcactggcttctcatgtttgaatctgattgaggctattgcagctattgaccctattgacaataatattgtataaaatcactttcacctctcatgtacctccatttttatcagctcgctcatttattgttcaattgcaatatcttcctcgagacaccatgcctattcataatgtggccattcaatcgaagaactgtataaattccatgaagctcctgaccaacctatttttttcttcttctctatcatcaacgatgaccccaactcgctctcgacgaactattcgcccgcactggccgcctggcatcaccaagaaaaacgccgctcagcgaatcttcaacataccagagctggtctctgagactgtccactggcaggtccagggacttgacgacttcatgtacaaagtcgcggggcatcgggggaaagaagcagtgggtgtggctagcgaaattccggccatggaaaattggcctgggtgccaagtgggagccctatgtggagggccaggcgggttatctctatagatttgcgactcttaaccgagcgttgtatacaaagataatccaacgtcaacgaacctggaaaaacactatgggtgcgatggatacgccggccgtgtctcgctcactagacgtgatcttcgcgaaggtcccggccggattccgcccaacagtacgctaaccatgtcaagctggcctcgttggtcaccgtcaacaccggggatgtccgtgttgctgacgccgcgctgagggatgttcgtttcccgaagctgcgggtattgaaattgtgcgttcgagggagcagtcgcgattctgacattcggacccttatgggtcgccttaatatcccacgaatctagggcgaattagtcactgtcctctccctcagcagctatggcagaagggagccagaatggagatggcctctccacggattgcccgaagattgggcaaaattgttcagacggatctcggtatgcttctgccaccgctgttacgataaaccgctttgtactgattctttatcataggttctctttctaaatctcgagaaagtcgagatcggacacaacgtccttgtcgccgataaggttgtcaagaacttcgctcgtcggtacccagcccctaaggacccttgagcggcgctcactcgagcgttcaattatggcctttgacctcttcggcgaggcttcttgagtctgagatcgctgcgcttggggctttccgagggtgcgttgcaacgacccttgctccggcaaataattgtggaattaggggaggatggatagggacacaattatatggtataaggtccctaaccaggttgaggacagtctcgagcatgaagcaattgatggctttacctacaaagggagctgacgcgatatgaggacctcatattcgtttaattgctggcttccctggtcttggaaagcacgctcttctgcaaactgtggatgccgtctgagtaaatagactcgtccaacacaaactcgagccacaaattctgacgggagaaacgatgaatgtttcgattgagccagtcgcggggttcaggagaaacccccaacaccgtcccgagcagccacctgcattcttcgctgagtctcattttacaccatcggctactccgcaatcactctcatcgagtgatccagctttctcctattcaagctgtcatggagttgacagagtgctgattgatttcaaattataatcagccgagatcagacaagaacaaaagcggcttattgacaagcaatctgcgaatacggacctcatctaccccgtcgctaagtacccggatctatgaacatcttcgtggcgatttgatgacctttctttcccctgagctaccagtgtaccacatttgttcgaactgaactggcatgtaacaatcttcacgggaactaagtagtaagaggacctttcttcaagtcattgcaccgttgataaccggcagtgtcatccgtatagccctgcacacctaggctacattcaatatagcttagtctgaatggaccatactcccactttttctatccagaatatctaataaaattcaatttacaaataagagggacataaaccccatagagaggagatatccccacatgtagtatatatacttttccaacgccgagtagcacaggatataacctgctttagctctaaagtgaaacacctcaaacccaggcctagggataaaaaaccaacaccgctctttggtatgccaaactcctttgtatcatgacgccagaatgcgaaggacaaccgtcttaaatctcctgcgagtccaacgcccacacctcccaatgctgtagaacctcccatcctacccgtcgcgcgcgccgtttccacacaaagccatcatcagtaaaggtgtgcgggtagcagccgtagaccggaacaccctcgttgtcttcggctctgttgggtgtcctcgggcagggtggcggtctgtgagtttcgcagccatctagatcgcgtgatcgtttccctaatgttgatggcggtaggattggtcttgtgccgggtgacttcgaccaagaagagatatgtgttgtttgtgtatcgggcgacttatgggagacggcaggctgatacggtgcgctgggtccaatgccgtcggtaccttgcgtgggagcggaactgtctgtggtggtctctggggatgcattatcaccgtttggtgtttgagactctttattggttcctaatggtattggggctttgtagaagtccttcaactcccaggctttccagcccatgctgataatcttcacgtttccgtaaacttgcttgttggcaaggtcgtagctcaacatttcggtcaggatcgagtcgtcgatgtccaccacttctgcaaaagtcttggcattcgcgaaagtttcttgcaccattttaatgctatcaaatcgggcagatgggtatatcttcagtgcagaagttgcaggaccacctgacgcctgcccggtaggtgggggtatgagaagccggatcgctttcaacttccggaggaaaggtattagtaaacccaatgagtccatactagaaaactcggtggcaagggcaagctgctccaaattcggacagctatggacgagtcgcgcgaccatcccggtggagagaggccatttagatggaagaaggagatggcgcaatgtcgcgccgtgatttgtggtaatatttgagaggtagatgtctcgcatactagctatagcattaagctggctagctggagaagcagaagtaataggggagttggctgtggttccgccgggcgcaccagacgaatgatgttcggatactggcggtgtgagcgccgatgagaccacccctcctccgggccgtgggcaattgaggatgtcgcttgattcggatgtgacattgacaaagtatagccgttcgagtccagagaaattcccaatgaactccgcgctccgctttgacactgcatccatccggatggatttcatgcggagcttggcatgaggcgggactgtcggccagctgttctcgacgaatgtgttgaccagacttgagccatcaaggccactgagaaatgtgacgtcttcgacagtagtcggatcaaaagcccagttgaactcttcggtgtggaaggcatatagattctggaacgtcatcttcttaaccgccagtggctgcttgcttgcgatcagcttgcggaagtaatcatgcagagagacactaggctcgtgtgcatcgcgcatccgtggcgaccaatgtagtttcaattcgcgcagtttcctactcttataaagaagagtcgagatatcatcggggtagcatagcgggtcgatatcggtgattttgagacatcgcaaatgcggcatgccgggaatgacgaaagtgggttgtgggtgacgactggacgggaaccggatagtcagagacgtgagcttcggcagctgtgtcaaccccagaaaaaccgtgtcgagcattttggtgttcaattcccaatggaagctttccaaattagtcatgcgatctatggcagcgcgtgcggcgatgttcagcaacatcgatgcgtcgggcacccggccgacttgggcatgctcctccagctcgtattccttccattcaccccgtagtgtcatcgatcgtaccagcgtcgcataagatcgtgtaataatggcattcaatcccatcgtgaagggactagcgctcccgattccttctggttgttcgtcgcgataacggattttgtcgtaggaggtcagcgtcaggctgcggtacagctgtggcagcgccatataattgaggactcgacatgttcgacatagccgggcgagatcgcctgtgtcgtcgacctaacaacagcatgtcagatatggaaatgagatgtgcggagttatctctcacatgtgacacaatctccgcaatgaggttcaacggcagagccatcaactgggcaccgccaggcggttcagttatgctcgctccgaacatgtttcgattgacggtcgccatgatgcgacgtccaaggtaaggtgtcacatagagatacaaagaatgcagggaaatgcaccggaatcgcgagttcccgagtgaaatttcgtctccactttcgtaagccagcccttggtcagccagcagccaagcagagatcagcgatagtcaccactaccaccactacaagcctgtagagagtatcaactatgagaggactaagtatggatgcaatattatattcaatttcaaaattataatgggtatctttctaagatgtcgaacggaatcctcccaacaccttgccgataatatcaaatccataaactccgtgaaatggccaaatataactgcctagaacaccaagaaatcgtcccgggcctagctcctcagcctccattcggcccctgaatccgtcggccacacgcgatgccgtaaaatggcgttttatggagaactttggccatgctggccgtttgaaggcccgtgcacaagggactcggatgtcccagtctgttccgctgacacatcgttcctttcttccgagtaactcgtatctgtccagctttgttggtcgtaatttgtgacaagttcacgatccaaatggctgatatcctcgttgatcagcgccgcagcttctgggtcgtagtgtaggacatagtctccacctcctcgctctacatctgcctccgtccatggagcagacgcttctggtcgagaaggaatcacccgcacaggcagattgggacgagtggagggcgctccgtgatgttgaggttctatcggccggctctctcccggtggctgggtgtcctccagcaggcggttttgcggggaccatgtgtgctggccgcggcgacgcgctggaataacagtgactggtaatgagccgtcggtgttttgtggtccagcgcctggtcgggctttgcgatggagagaaaagaagagatcggctcgagaccgggcagcttttgcttctgcctcggcctcttctgctgcagcagatggtctgtgttctgagaattcttcctcggcttgtgcatacgccacttctttgggcagagatgcacgtcgcctcttgaatgggtgcaggagaacatgccatcgtggatcggcttgcacgatctgcggggattgttctcgggtattttgaacggaaagagcttgattatggatacccggagtatgtggctccctgccttcgagttccttggcttcgtccatttcctcctcctcgtgcatatttggcattgcgaccggaggcgtagggctagccactggatgatatcggacattgtacactgtgcttgctgcactggtagtatcagcacggctgatcggtgtgatcgccgctgggggtggagtaggccggtgaccgtttgggccccgcggcgccgacgcagcggcttggctatatggtggtgctctggctcttttgtttcgattgccaagaggcaatccagcccgagcccgtagaggtcgatgggctaaacccatcacgccgccccatcctgacgatgcgccattgccgccaccttggtcgtgtccttgtggggagaatcgcggccagtcaacttcctcggatggagtgacttcaagcatttcatcgccatcaaaaacctctcgtccaagaatcccatccttggtttcatctcgttccagcgcttcaatacgttctacccattcccagaccaccacactggccgctgcagagccaacccatcgaatataggtaccccagccagcaacttcaggcttggcaatatccaaaacaaaaaagacaacaggtatcaaaatggcgcatagcgagagaagagccactaagcagatattccgcatcttggggtggaaaaatgcgtatcggtgcttggatatcgagtagaaaatcacccaagcggcatagagaaggttaagcgacaattcgaacaagtagctcagagcaggaatggcatcctcgtatagcctgggtcgtgtcggagcgttcctcgcccaaaaattgtccaaaatactaaaagtcgtatccagcacaatcaacgcaaacccagcccatttgatcataactttttccttatgtcgcgggaacaatcgaatcaacgtctgaacctgcgcaagccacagaaatgtactcgatatgacgcgcacgatgcgaatttccatgccgtcgataacctcctgggaaagcgcctcggcatcggaaaacccatagttatactgccgctcggcgactcggaaagaatccaccgtggcgatagtcagcgagatcgcaaccaagatcgcagccactttctgtagccacggtcgtccgccgactccaaccaccgacgagttcccgctatatgagccgctgatcatcccatggcggccgaggaagttggcgccgccgccggggccgccgacgtaaaacgtgcgtggcgtgatgagaaggattatgacgaggagatagctcacgacagtcgcacaaccgatggcatatagctgtggggtaatggaggaataaaatggatcgcgcgtatcgagaacggcggagatgtgaacctcatcggttggggagccagtgcagacaggctcgaagacggcattttcactgagggtaatagcgaatgacttattaagataaacgagtcctataaagaattcgcacctcgtaattagatatgattctagaaggggcgttccaaacaccaagtctgcgaccggcaaactgcagcctgcggcccaaggaccaaagtgtcgatgaagataggagattacataccattgataggcaagacgacaggcgtacagcccggcgtataaaccttcgtcgtagtcggtgttggattcgcccagatctggcggggaagcaagtggaagtcattttccatgatgtgactcgatgtgaacggcctcgaatcgccgtcacaggaaacagttcataaaccgcgcaatttccaccgatacgcccttgtcgtagacccttcactggttaaactcccattattgactctgatcgcgtacagacggtgcgaatccaaaatccggggggggggcgattctggaagggaactggagaaacagcaacggcggtgtgagagtcgggggacacgagacgagcaatgttttctttctgtcctactccgagaaaagaatgaaggtcgtaagatcataaaggagataaatctacaaggagacaaggaattaaggaattaaggtgaaagtctggatgctccgcccatttctcggctccgcattggctcctccacaaattcctcacgcttatcgccacaccgttgatgttgggtctactccgtacactcttctatatctcacggtttcaccaatatatgcatgcccattgtattgatatgtataagcttagctgagtcaagggccaaatttcactatgttgactgatcgaatccaacatatctatcatccatgtatcacatcgctcttcgctgtacaacattatcacacataagaatcgccgatattccatgggtaccatctcatcaagagatttattccatttatgcctgggcagcgaagccaagacgaggtccctcggagtcgaaaacgacgtactggctcttgaggaagatatcaccgaagatggagaagccaatgccagagttgctctggataccaccgtagcagctggagctaccggtagagacaggtgcgaagttgatgtacttgccgggaacaacggcatcgtagccattgatggtcacagtgaagtcaggcagagtggcgctgcaagggaagatataaccaccagcagagctgctgttctgggagccggtaaccttcttgtagtaggcggtgacaatagagctatcgagcaggaggagagtggtaccggtatctatacaattcaagagattagtcatggtaaacaaagcatggatgtccacaagggagaatgtaactcaccagcaattccggtaatagacttgccagcagcaccagtgccgatcttgtagctgtcggcagtgaaggaccagaaaccatcggagtcatcaacgtcggcgtaggccaaagttccggtgtacttatccgagtcgatgtagccgaagtcgtaggtgccaggggcgccgtgcttgagagtcacggcgaacagaggctcgccaaggctagacttgacggtgtcgaagaaggtcttctggggggtagggctgacggtgttgatggagctgaaagccagacccagcagaccatcgttgttcttgtcctgcaggaactgcgagctgatcttcttggcagcctcaacagcttggccagtggccttgactccaccaacagtgacggtgtccttgtagacatcaccgctagcactgctgccatcgccgtatgaaatggaccagctagcaccggacagcttagtgccggagctgccaacgttgtagacgtcgtggccggactgctgcgaagaggtaagctcgctagagaagacccagctatatgaattgtcagttgttgcccttgctagtcatgccatatcaaccaacttacaggtcagcagagccagtgtcgaagtccaagttcaaggtagagctgccaatggtgactggagtgagatactcaacgtcgtcggcctcgggcgtggtaatggcggaaccgctcacggcagcagcgtgaactgtggccggcacagtagcaccatacttgaccagtgcattggcgtacagaccaggcaagttgacagtcctggtaccgggaacagccttctgcacctggttcacagtgaagcccttgcgggggctcttgaccggcacagccgcagctgaagcaatggccgagaagcaggtgagagcgacggtaacttggctgaagacaaccatcgtgatagttctatagaagaatgaatagatctattgtgaacgaagacgatgctggagaggatggatttcataaagagatggaggcaagacctcctttatagctttcctgatggatgaaatccgccggcgtccgagtagaaggcatcaacggggctgtctatcgcaacatccaggacaaggtgataatacccttgtaggaaggaaacatgacgatcctgcagaatccagtcaagtcgaagagaaacttcgagatcgtcacggataccatcggccatccaggagcacgacggagtccgccaagtaggcgattgaggggtcaagccaaaaagggacatagtgccagggtctcaagaagctaagatggtatcaaatggacgtaagaggattagcgcggccagcgcacaggggcgggagatgtatgagatgcaacacaagcaaaatgcccagggagcttggttgtaacaagctatctaagcagaacggagaagtccggccaggccaaggcgttgtcttgagagactgcgtctggatacatcattgggtgaagactggtcgatcgccatacttggccatccttgtgtaagaggacaataggttgccattggctcaagccgatagccagactacttggattgtctttcggctatgttgtagtcacgctgcatcgagggattgttcagagacgctggagactagagccctgacgatcatcgcccgttatctccacgacagccaatcacctgcgcgaaaggccaaaactaggtcacatcgctccattagggtaatttggcctcattggatgagagacattctgcgtatgagccttttgggtttaacctagtgcctagtaaggccatactagctctcaatgaaacaagaacagttataatctccgacggggatccgtccctgcattgtatgctccaccaatccttatacagaacatcaacatggggtccacgatgccagaccgatgtgacccttcacggagagagaccaaatagcggctcttatctgcatcgaaggcatcgaaggatctagcggccgtcgagatggcgatctgctcatgggatcggcgagtaagatagtagaccctacgtactcggcagggataattgagtgccgtgcatgccatcaatcgcattgtttgtagtctatgaggtgactcttatggtaatgtattactctcgacctgactgtaatgaaatacggcaatagttactatatttacattgttctcaagcttaacccatctcgtatcaccattataaggccaaagccacccgaaagcttcaacctccgcggcccaagaaacttttaaaatatcatgtgaaagtcaggagaataaaagtacttgatttctgcatgaaactagagaccccgcaatcgaataaccccccgacggacaccgccggggaggtatagggattcgcaataatcaatgatgggctgcagtaatagcaccatcggcagaagaatcggttgatgcaaattacggcaaatggtgtagacaagaaataagaaacgccgggtggaaaactcaggggtatataatttcaagcaaaataatagaaaaaggtacagaccatgagctagatcccgaaaaagactcccatattaaagtgtaagactaaaaagaataccaaattgttcgtcatcatcattattttcatcacaggtactgggacgataacccggccccagtctcaccctcgccgttggtgtttccatcatacccctcattgaggagtacctcgagcatgtcaaactcgccaagcatgggtcccgtcccaccaaggccctggtcaacaattccggtggagctgttgaagaattgatcaagaggcaaggcaaaccaatccggaagcgcgccggaggtagagtggtggctgtcccccataggctgtgatgaggggacatggtttggcgatgatcggtccatatcattggcagggaatgtcgagctggattcgtagtagttgtggtacacggacggcggaggcggcatgaaggatacgttgaggttggatgagttgatcggctgggcaggaatgttcgccagtgggtcatttcctgacaccatcggggggccggtgccaggagtatccacatatcctaggcccgacccgcctgacgtcgtatcatgaccctggttagcggaccagggtgtattcgggccctcacgacgagtcgttgagtgatcgcgcgatggtgaatgaggccgagagcctgagactgaggtacgatcatgtccgtctccgtctgcgccgcggtcatgcggtgcaaagcgcagaaagcgcgtccgaatgctgctagtgagaagctcgagaagccgggctaccgtgttgctgaggtgcacgtcatccacaacataattgcgcagtgcctctaccgtccggtcctgcaggtctagagagactcgcacgtcgtcttctctggcacctagagtgaaagtctatggtcaagattagtattatgcttgccggggtttccactagagaccataccttcaagatgaagatcattccagacaagattcggaaaaacgttcgaatgggtgcgtgtctgagacgaccttcagggacaaggccttccaatactgtttgcaggattttgcgcgacgaatcaatgacttcctggatataatgctcattaacacggtagagctcgttcaacgtttggaaccagctgctgctgctgttagacggccccgatcctggttggccattctgggtctggttatgagtctgggtggattcgttggacatggtagtccatcgatcaacgaccgcttgtagagcgagggaatttatatagagacctgcttccatgtcagctgttatccttcaacgaatcaggctgtcaacttacgggtgtactcgagctcaatcagcaaaacgctccgcattgctggtgagacttctttctgttagctttcttatccatattcaacggccaattgacttacgagtcacactgtccagctgctgctggaaatctcgtagataaggttggaagcggtcgatctgctcacgatatctcccactcctgatcagatccatcgtctggtcactagatgcaaacagcaaatgattggcttgatagacaattttcgaaatgctaatccagcaatcctgcatccgatcaagattggcatcagcatcatttgcatcagcggatgtcggcgtgatatcctgcccccattgaggcaatgggagcatagaggggatcccaagacgtccactactatgcgtaataaacacaagaatcaaacgccgtagtcgacgtttccgtgtttgctcggatagcgactcattagccgccttggcatctcccttcgggtcgaagacaccaagttcaaaagctagagcttgcgccgtactcagtagcatccatgacatccgatccgatcgccaggccggttccagccatttttgaaacgcgacccttccctctgagcctttgctattattctcgccgtcgttgtcctggtggtcggcctgactgtatatctggggatctgtatccaaaagagaattttcatcgtcgcccggtggaaagtgtaggtttcgtgggtgccactctgtaagaagaagcatagcttctatagtgcccagcgacctcaattgcccacccatactacctttgcttgacgttgatgaactcgaatcaagtgatcgagatcggccaatgcccgaggtcccagcgtcaaatttctcttggccccagaataggcgttctaccatgctgcgtagatatgcccagagacgatcatggatatagaatgcccgcgtattggcaccctcacccttgggtttcagatgcctagatgcgatagtgagaattgtaaccgccagcactggctcatcggtaagcaacgtgcggtgtgtagaaggatgagaaaaatcagggattacaacagggctcatcggcgcgaggtgttcatagtaatacgccacatagtccatgccttcctccactgtaagccaaccggcacggacgaatcgcaatcgtgaccaggctcggattgcgtccagatatgtcggctctgggggagggttgttgactgggctttccctttgggggccgggatccgcgatctggggatctaccggccctgaagcaccacccgggtagtatgttgacccgcccatagacattcctgatcgaggtgtccgcacaaaggacccacccaaacttcgaggtgaactaccttgtggtagaggtgaaggccccgagttaaaggacgagacagactgtcgtgcagcaagccgattttcgaggctctggcggttgagatcctctgtcctgcctgcagcttcagagagaagatgcagagcgtcgtgggtgtttgtaattgccggtgacagcaactctactgctgtgcgattcatcatcggaggccctccatagctaggtggtgcaggccgttcgatgccaggatatataggaggtcgtgttgttggcacactgggcatgtaacgcggagttggaggtgctggaggcgcatgtggcgcatgaagtgcatgaggtgcagaaggtgcctcggaccatctctgttgggcaagcacggcttcacggtcgaactgaggtgtatcggaaggcgcaaatggcggaccttgactttcattcttggccacctccccaatcatcattcgcttgtcgcgatggaggattgccgctgcctccaattcatcttcctcggcatcggaggtcttgcgctttcgacgcgttgccgaaaattcacatcgtttactttcgcgacgacatcgaacacagggtggggggcgaggattatcgacacctattttttttgtggtcagtccgaccgcagaatgaaaaggaatgggagtccatacttcctagatcacacttgaccttgcgtttgcgacatggatcacaagcctgatatcctcggcgatggtgtgcatcagactccgccttgctgtacacactattattgtcccccatttcgtggatcgcaatcatggggaaggctccgacacaaagcgatggaaagcgagaataagccttaaaaaggcggtgggggtgttcttactccgacgactcggactaaaacagtgggcacagagtcttggaaagacaatagaagatgaaattgcacttgaaattgccaaaggagatctcttggtcgaaatatcaattgaagtcagagtttgctcgcagtcactggacctggtagtttccattgtataatgagaactctgcggggtaagacacggaattccagaataccacctacatatgtacagatatatatatgcacatgtacatctcattactttgaaaagtagatcctattctaattcagaaatgcgacaattcaaccccgacgttcaagatgtaaatgcacaatgcttctaaaccgagaagaaaaaggagcaggggaatgccacaggctaaagttggtggcaattccacttgaacggtatattcaaccctccacaattcattctctgttctctgtactagaaaaaaaaacctgtctatttcacccgctgtgaggcgaggctaacgttcatccgggacattgactcccaagctttgcgtggcggcaccagctcaccagatgcaccactgtccacgctgccacgacgtgagagatcaggcggggaccgcccagcaacgagagctctaacaccaccagcttttcgggcggggatcaccgagtcgccagaagtaagaacgtaaagaaggtacttgagattcggaagagtgtgtcggatatccaagacgcgcagtccttgtttgatgaggatgtattcaatgtctttgttgagcaagaagaccgcgtactcgaatcgatactggacactcaccggatagagggggtaggtgcgctgtgggagtgatgcagagatggggtcttgtatgaatgatgttgacccgttcgcgttgatcgagtatgggagatgcaccgacagatagaatgagagcagatagaccaagtgagctgtgtgtcccaatgccgctgcgactacctcacggtcgatatcctcgaaagtcgagtttgggagggccagcccggcgatggtaaatgccaagggttcatcggggatgggctcaatggggtagatcgtgagaagatcttcagcaatacgtcggacctggcccttggtatcctccccattttgctcgagcaattgctcgctggaaactaacctctcctgagcctcgggaagatgaccgcgtgtcttttcctgagtactacggccttgttccatcgcttcttttcgggctttgatactggcaatgagctcttctttgcgcctgactgcggtgcggactcgtttgcgctccatggcgacataatgcttggtaagagcaagcttttcctgtgccgcagctgcatcactcgctacattcaatgagcgctcattctgctgtaggattgagctaatctgagcctccaatttttccctggttgccagtgcatcctgtacacattcgtccaaattggccaatctcatcaaagcgtcataggacgaggatggtaagacagtaccctctgcagtggccctctgtcctgcagcttggagcgatgtttcgaccggcggaaggtcagtgagattggaatagacaccgtctgggaagtgaaaaaggatcgagttcgcaggaagtggttggtggaagctctccaatgttttccccaaaaactgcagcgatcgcaaatgcaactgtagttcaactaatagaataaacccagacatgtccccggtctttgcccagagtctcagagtcaattcgtccattcgagagatatatgggccacacagattcaagtcgaaaaatcggaaactcggattgtttgcacggtcgaccgtctcgctaatatagaccggcttgttaagaccatcacaatgaagtgagaagaatgtgtccgccatacggctattggtgatatcttcgagtctgacctgccgaatttgaggattggggtcgttccagaacagggtacttctgcgacgcatagaaggcatcgcaggctcctttgcattgtcatgttgactggaatgcgacttgagatcagtgaaggatcgagagggttgcaaagtgcggtttgtgctctgcgataggatcttcgacggcgtctttaaggtatttgggatatcgtcgtcatcaatggttttgccgtgagctcgagccgggggaggcgtcacaactaagttgcgtatagagattccctggagatgccgaagcctacggttctaatagtttgtcaggatctagcaccgacgtgttctcttccattctccatacatacccatgcatagagccatggcctctctctgcgggcacctatatcctgctccgtgtcctcatccataacgccagcgctgcgggagagcgcggtggtttaagtagtgcgttgctaataaatcaagtcactcatattaaagacaacagtaacaggcaaattgcagtttgaagcaattgaattggcgaaagagagaatagtgagctgataagagatgatgcggagagcaagcgccaagacctcagcgttccccgtcaaaaaatcgacctcccgtctctctcgatcaacaccgtctggcgcctcccaccaatgcaataaagccgcacttctcactgccccgattcttcccagatcgactgtacgcagcctccggttcggccgcaatggcctccaacgcaaagtctttccaaaaggtgctggatgcaacagcacttgcggccacgaaattcatccgccggccaccgattgatccgaaattaccaattcaaggaaagccccgagtaccgggctcaaatgcattcaaagatcaccaggaaaaggagggtcgacggttacagaaggccttgaattccgtcagccacggcaagaacatcttcgtgtacaacaacatccgcacgaaacaggttgtatactcattgactcgctacctggaggtgagtttcttttcccctactggcacgggctttgaaagctccggtctctcgcgaaaccctctatgctgtcctatccttccagtccgccgtatcgcaattttctaacttttgggacctttagaaaaacaacctcctcaagcaatgtgtcaaccacggcaaaaagaccattcccgccacagtccgcaaggatatgtgggtgccatacttctctgtgcacttcaacgaggcacaagtcggactgaacgtctataaccacctgcggcaattcgcgttgctgcgccagctctccccgcccaaggaaatgatcaccgtgacacaagaatatctcgattcgaagcggccggtagacctaagggaccagaagcaatgggacaaggaaaacatgggaagagtgggccagatcatgatgaagaaggagcgtgcttacgccctgatgaaccagaaggccaccgcgattgccgacattgctttcgttctgcagaagcaccgagaccatatcgtggagggtgtgccggagagctccaagtccggatacaagactctcaaggcccgtaggcgcagacgtgcggctctcctgcaggaggccgcgcaggctaaggaacgtgcgggtgaggttgcatcgctcgaggagcagctgcaggttcagattagcgcggaccacaacgcgccacaggagaagtctgttaagatcttgtggcaggatacgtacgatgcgcagtttgcgaagaactggcccgattacattgagcacggtcagctgcgctggactcgtaaccacatgattggccaggaggaccttccagtccctagcgaggacatcatcgccgatggttcgtttgagcaggcgtagacgtttggtgtcattgacgttcttcttctctcctgtccgtcgcagaccaagacgagacgttttgtgtgtgttgatatccatttccctctggctttggtctgatggttggtgctttttgtattttctctcttgtctctctgtctagcttatcctagcatccataaattgtacttttagatatatcaaatcacaagaagatatggccaccttccaagtgctgtcttcttttgacatcttttctagcgtcctgttaagtgcgatctctttcgtttttttctttgtatcatcttcgttctctagatgaacggtggaaaagatattataatgcacaaggcctcaagtttaaacgactaactagggcgttctaaatcaaaatccttttcgttcatagcaaatcaaccgactgtctatcctaatgtccatcgcatcattgctgatcataccctacaccagcagcggatacaacagacaggtaccatgtcttcggtttaaagaatcatttgatggaaaacaaaagagcctaatctcatagcggccaaattcaggacaaatatcctaataatagaaggaatagaaagacttatgctaacaaaagacatcaagaccaccaagtctgatctcgtaataaacaaaaggttgaaaaatgaagacaacgggcaaccagtgtgcaccattgacgccaatgtgcaatgtaataagtaagcgacaggaagggaaactccagaagatattccgggttgggtacattgctcccagaagcaccagatgtagatagcagacgaaaagaaagaaatggacacgttctatcaattcgtttcacagcttcagaatggtgtttcggcttcataacatgtcgtaaaatcactgagtcgagccggacgggttgtccgggcttctattcggactcagaatgtccacagagggaaggtcgttattctctttagatgacgtctcgggcccggggtcttgtttgtcattgctgttggccattctctgaagaacctcttcattggccttctctgccgctgcgggattatctgcaagaccggaagccacgaggcttttctgtgctttctcgacaatcttatcggcctcactcacgcccccagccacctttgtatgcgggtccccgtccacgcctatcaattccgcattgttgttgacaatgtccttgacacggttggagtcgaggcgaatcaccatgcaagacaggttgtcggtgctgaaccgtgcaagggcgtggtcaacaagaatctttgaggcatgttgagcatcttgaacgttccggattagatcgacagattcctgatcactgcagacgtcccatagctattgaattataattagctttcttgtatcatcaactttgtgaatagatttcaacttacaccatcgcaggccaagatgataaactcatcggaatctggctggataaccgtctctgtcgtgtagggatgcccagtcacaaggtctttcaaatatgcatcgcccaaggcacgggtgacggccagaactccattcacacggttgttcaggattagcccgccagcgttggcaactcttctcccttcattctcatcgctacccttatggtcataggacaaacgaagtgctttcccattacgacataatacaatgcgtgcatcgccaacgttggctgtgtacaatacccgttgccgaatagccttgtcctgcaacttcgggagcacaccagagacgcccggagtagcttgagtcggggtttcgacattctctgaattcgcatccgctttcgtcgccgcggcagccgccgtgccaatggcagaagaaccggtggccgactgtgagttgggtacacgatcttcccaccgaagcacggcagtgacggctgtgcacccagagtttttgacaggcaatttctccaactgctggtccacactggtgaaagtctgatcaagaagctctggaacgggagtgcctgggcttttgcgcatgacatcctcaagaatcaaatgcaacttctttccacaccactctgcggcaaaggtgccggcatgcccatcgaaaatcgcaaaatagccattgtctgtttctacaacggtagatgaatcctctgatgactgtgacacgctagtcttgggggaactagcaccatttagctctggtgcagttggggcaggggtgcctaggaaattgtagagataggcatgcgtatcttccattgtccggcgacatttgcgattacggtcttcggtaacaccaacgcggaaggatgaccgagcagtcggcgcagattcaccggcggagttattgaacgacccttgagggacgctgagggccgggtccatctttccaagcttctgtagtgggctttccgcaatcgagggactggtgctgatcgcagaactatcccggccgttcaagttcagggaacttttggcgctattgaagaaatttgccgctttggtaacggtactactcctgcgcttcttctcgccagtggtaccctgttcttcactttgtcgacggttgaaaaacccagcgctgggcggagagaatctcttatctcgtggactggtaccgattgaatcggtttggagggtcaaggagttggggtcgaggccagcctctgggagtgcgtctactttatctttaggtgggctcgaggagccactgaacattctgctcagtaacccaccctgcgaagaaaaactgcggcgcttatttcctgccagcttgattgtatcccttcaagaggaattggtggatcgggatggtggtttagtgatgggcggggcgagcacggagggggcgctgcgaggctgacgtaggagtcggtcggtcgaggccgaaataggaagaattgggctgtaagtgctaaataaatcagcaacgagtatttttgggagcgaagagatgtctgaaatgaaagacaatgaggcgcaaatataaagaggaagatggtttaggcagtgagcggcacagacatgcaatgggggggggggggcgcatagtaggatcacgaggggaggtgttgtctcttccaacacataaaatatgaaacacaagtaagagaaacaagaccaatcagagcaattcagagtatatgaaacccatcaatcctccgagcaaggtacaatgtacatatttgcaccattggtcaatgtatagcgcgtctaatgatccgaccacatccccaacccaggcagatatgaaactcggtatcaaatgaaatcgagaaaaggaagcaacttacaagtcaggattgagagaatgggattgtgagtagaggatgaaaggtgaaaggtggaagaaggtgaaagaggaaaaccacctaaatgacctccgctgacggctcacacggcactgggcggagagagccaagactgccggggtggaaatggatcttagatctgatatatggggtatctcgtggatctgatatatttcatatacttgatttcagaggcatattggagtgtatacgaggtccgttgcgaattcatcgtacgcatgtttatgacacctctccgcctttggtcgatgacgctatgatcttgtttcttgttatcttgccactgtcatactcatgcacgacataggtagatctagatttaaacagctaacctcgcaaactccaatgtacctgcatcgtccgcttcattgtggataggttgctcactttcatcagcctcggtcccttgttgaaggtcgctttcgtccttcgccttcttgatatccatatgacctagtgtatattcatctggatcccacgccaaaactctgctattcatctcctccaatttctgcacagcaagccgtcccatatcaagtttctcctcggagttcaagtgctcaagtctttccttccatgcatcggcgggatcagaacactagttggtccgaaaaatcgactgtcgatcttttgccagtatgtagcatcgaatgcaaaattgttcctcgcgatgtacgcaatccagaaatccccactttcccaactctcttgcatcggaccagacagtctctggtcttcttttagttgagacttcttgatcgctttatcctcgcgattgatcagggcccttaggaatgtctgaagtcgacactcatactccctacaccagtcttcaagaccgccatctgtgggccagtattcgggcttttcaataagaagccaccaaggtggcacgtaggtgaattcaacgggggcagcatatgtgaacttccagtccacaactgcagcaattttcgattccttgttgagaaggacattacctggtcggaaatcgtcgcaccaaagtttaaaggggctatgctcaaaagatgcccatcgtcttgtgagtttttgttctcgcgcgagttttcggaagagacatctggcaacgaacttgtgtcgacagtcatcggccgagtcaacggcgtcgttcctttggttcataagatgtgtcatatgcagctctgctaagctcttgaagtataacgatgttgaatcgaatgtagtgtccaggcccggtaagcacgcttgaggcagtgatcctaatcgaataagttcattcataggcatcgaaagaggtcgagatgccacttcccaggtgagatcatcaatctggccaagtgaccctatatgagtaagggacggccgagagagctgaagcagaatatttgccagctctccctagagccgctcaagttcatcctcatcaaaatccgggtcaagaattctacggtatgcccgtgagcgacctggcgtattgagaacatcgtacatgttcgtatggtgatccatgtattccatgattataaaggggcccaactctggatccaaagggccgtccttccgcgtgccccaatgaaggacaaaaggaaccgggatggaagtctggtcaagaatgtatcgcattatagcgacctcattgcggactttctcttcgggaaacataatggcaccagctgtggaagacgtattatagcggaactagtattcttgtatgtcatctcaaaagagatattgaaagctcctttttccaaaaaatcaaatgagtcaggcttgtcgggttcgtgatgtctcacaaggaaacgtccaagctttctcaagatgtcgaggtcggtgaactgggcgatccaagcttcagacatctcttcgcttttctcccaggcagcatcatcgtagtacatgcgtggtttcataattatggatagcttgtatagatgaacttggaggagataggggaagatcaaaggtgcatagcgtgacgccgcgtgagcactaaactggaaagggaaagctagaagatccacttgatacatcataaatatgaagttctcaggttaggtacttatgtacacctacgtggcatacgtaggcaattagccttgataactatagaatctgcttagtgtaaccaattgcaggatgtgatcaagcatattcacataaaactacaactcgaagaagaaaagaaagcattaggaattagatctattaccatgaactaaagtttccaaagcctccagacaccttggcctttttgcgagcgggctcaggtgcaatctcctcgtccagaaactctacaatctcatcttcttcctgtccatcccggtcttccagtgctgccttcagatactttccaactcccgagacaccgccatcatttgagtccgcctcagaaccgcggacccgctttccagtccaggtgactcgatcatcgtccgcacggcgagaaatctcctcttcctcttctgcagaaggacccgtggcacctgtggcccgcgcctcttcggcgcgcttctgggccaggaagtcctcgaacggatctacaaagaccgttatttccttgatacgaatatcgggggtagggcgattcgtagttgtttccactgggtggatctctagcttattcaaagtagtggacgaaggcgttgggtcgtcgattagacggccgaagatggtgtgcttgaggttgagatgaggtagggctcgataggcgatgaagctgaaagcacatgttagcgcactcattgagccaggggtaatcgcaaggggccacttacaattgactactatttgtgtttttgcctttgttggccatgctcagcgtgcctcgggaatcgtgcttcaaaggcccttcaaattcatcggcaaagtatttgccccaaatactctcgccacctcgtccagtaccagttggatcaccaccctggagcatgaagcccttgatattacggtgaaatggtatatcgttgtaatagcccttcttggccaactgaaggaagttccacacggctttgggcgcatgctcgggatacaactccagattgagatgcccggcggtggtcacaatgcgcgcgtaagccttggccttcacgcggccacgcttgagcatgtattcctcctccgatagtaccgctagctcggcagacgtgtgtggcgtcagcccggtgctagtaaacgacgcagccgccttgcccgtagtgaatcgtgcagcgttgtagggtgttggctttcccgtttgccccttagaagctacattcgcagctacagtcttcgaacccactttcgagccaatcgcagcagaaccagcctgctgagcacgttctgaccgtgcctttgcaactgcctctttcgctttcagaatcttcgccgagctgccgagtgcactggtgttgacgctcccagaggtcggttggccttccaagattcctgtctccccctccttgatgtagttgaacgagctgaggttgcgcgactcgatgttctgcgggtcctgcaaggtgataatatcttttcggctgaattcctcatccgtgaccaagtcgcgccacaattttcccttgatgttgagtcgctccaccgtatcccaggaaaagacattccctgtattccgtaatgcgacgatatgtgtattatcggtcagaatcttgtaggtcaccggatcgacgtagtcaccatcctcgttcttcgcgagagtcaacttaatcaagtccgagctcttcaatggggccccatcgacaggattggtcccatgcttcttgatccatggcagaatgtttgtgaggtcgaatagtgttcctgtaggcgtgcaaaccgggtgtgaaaatggttggagggaaagggaacagaaattgaacggcaagcgcttgaacgcggcgtgggggccgcccttcttggccttggaaactccagcgccagcactggccgagaaagcatctgcagatgcccactcggagtgtgtgatctagagagagtacaattatcagcggggattcaagatgcgagtattggaatgtagaggaaaatgtcgcgtacataaagcttatcggttcctatagtcaacagcgttagtgaaattgtacaaaaaagccctcacacacgacataccttttcccataattgaagatcaagctgttcagcaactttcgcgcagcgcagcccgcggagatcgaatgacggcaggacgcttaccgctttgagattacggggcgaataatattgccgcgcagaaaatatatcaataagtaagcggagtaaaaggcggtaggctccattaccctcttcgagcaagatatagatatccaacttctacaagggaaatatgggcttaaaattccatttgtattatctggcttcgacatttcgggccatttgtccagaacctgaggtcagaacaaggccagtggataatcatacatgtacaagtgctaaccccccgctagaaatcctagaaacccatgcatcatgaaaacaaacgctgtgtgaacagagctaccagctccgcctgaatcgtcacgcaaattgaaaacgcctccgatgacaatgtagatcgtggtaattcataggattagaaagggccgttgtgtttaggaaattgcgggttggtacttcaatggcacgacccatttgtttccgaaatcaattccatggcgacgacgggtaccgtactttctccagacgatctgagggattccgatgtcggcaactgccagattccaggatagtctttcaccagacagaacagcattcagcactccagtcttgggcgctccgaggcacaccacagatgtggcattgacgcaaagtcggccaccttcgaccagagtaacctcgcctgtagatttttctatattagccacaccagttcagactatttttcgtaagtacttaccagtagaagcattgagtccggaggggacatccacagacaacacatcgacgttgctgcggttcatccacgcaatcatctcaaaggccacaccctggtcgtcagttcgaaggtcgtcaaaggacagatgcatgccaaacaacgcgtcaataatcaagtcgggccctaggtccgaggtggccaaacgggcggatagttcttcccatttgagtacacgtcccccaaccttgcggaagatatcgagctgtttgcgacagttctccagcaattcagcttcgtgttcgagcccgagcaaacagactgtaacccggtgacctcggttacgcagatggcgagcagcagcaatcgcccttgccccagtgcgatggttgccagtaaggataagcatagtgggtgcagcagcatcattggacagaagagccacggcagcctcagctattccccgacctgcattctctgtaatgatctcatcggccaatccaaactcggcgaccgagatttgctcgatctccagagtctgcaacgggctcaccgtaggacagctgcgattggtggttgcgagccggaaagctccagcactagaaacattaggcgcaatcattggcgacaccgacgatcggcttggacgagggctagttgtacgagaaatgttgacgtgaagctggctgcggccaagcgcactgagctgtggcaccattggcggggcctgcatcgcgctgtctttgcggggaggctgagcgtgcgcaggcgcccttggccgctcgcgtcccgaaagtgtctcgctgctcagtttgatttcactaattccttccacatcatccccggtgtcgctgtactgtgggctatcgagtacattctccgtccagtgtaggttctttccgccgttggtgcccggcttgactcttcggttgaagctcaccagtcgctcctcgtctgcggtagtgtcatcgtttcgaatttgttcaaatacagtccgcttatcgaattttgacaggttgcttgcgaagtcgaattcgcccagctcttggatgtcagtagcatcttcggttgcccagccacttggatcctcggcataacggcgtgacttcttcttgcgaagtttatttccagaccggctcatagcttcaggtgaatcctggaatgcagggacagctggctccacaaatgcagtctggcgccagcctttgctctttgggttggtgcttgctgcgccgccgtgtttagcgacatatcctctctcttcccgtacattttcttggttgccacgtcgactccgctttggtgtctgttttgatggtgacagttcctgtgggctttggagtaatttcttgtgggaagtcccttgtattccggtcttgtcactatctgcattcaattccaggctgctaaatggctcaaccaaagaggctgagaccaccccagagtgttggctggcggggacagtcattggcgcattctcaacaaacggattagatacgagaggggcttttgaaaaactcagaatagccgggtcggtaaatcgttgctgtgttggagtagattgagtgggcgctgggggcaaggccattgctgcataaggttgaagctgggggttaggttgatgctgaggttgaagctgaggtaggtgctgatgctgcgagggaacctgggtattggtttcgagagagagggtggtgatagcagaggcatcaatggaatattgaggcaggcgttgaccgttccagagaaatgtgactaattaccaaagggttagttattatgacattacatactgtactcattcatggcttaccatcctggagcaacaagcgctgcccaaatacgttggcgacctggcccaccagtcttccaccgtgtggctctttcaatgtcaccagcacattgtagccaataaattcagatgccatgatgattgtgagctttcgtagtccagctgaacaatcatcaagcgtgcaattgtatttgttggaaaagcgcgtcaaacttgagatgaccctacggagttagacgagagagctgtgagacaagctgggcagctcaatcctagggcacgtgatttatactatcgataagcgatagtcgatagtcgatagtcgataagccgtggagtggcgagggggaatacgagaatacgagatactatagatatagatgcccatgggtggtttgaagcaatttgtgtattgttgatgatcaaaatgcattactgatacataagtagtgagaccttttggatatcgatgttatttctgacctgggaaaagaaaaaaaatcgcaatcttatatatgaatcaaaagtcttcgtcctcaaagtcatctgggttcaaagcaattgaggacttcggcttgttgatctctgtgcccctggtgagtttggagtagaattcctgcactttcggatgcaccatcaccttccgaggctcaaatcgagtaacctgcagtccctcctgtgacaccgctcgacttagtgcaacataagcctggcccttttcaaacactcgacccagatcaacttttacacgttgaagagtctggccttgggccttgtgtatggacagggcccacgccaatatcaacggaacttgttgacgttgggcttgtacttctccgttgggaagctcaaccttccacgtctctggttgacacagtaactggcgttctgacccatctggctgaaggaaagatacaagcggccatttccgggccattgaagctgcgccttcttggtttcccataggcttcagcttttttctagcttggtgagcccgctcctcatcgcttccagtcgtcgcgtcaccggtaaagtttttgtcgttttccctgaaaacctcaaagtaatcttcactcatgaaagctaccactttcccaatagagccattgacaagcgaatcctccatattcttaatgagcatcacttgggcacccttcttcagctggatcataggaggggctatgcagcctgccagcagtctcgcgcgttgctgagggtcctgaattgctccggaatccactgcgttgaacctcataatctcgccagaaagtcttcccatgcgtgcagagttggcaccatccacttcagcgcgggttgggaacctaattcaagagtcagatttgacacagtataagtatatagtaaaacttacagttccgttgcctcgaactggtctttggcatcaaggggccgagagagccgtttaaaagcctcaatcgtgcgaggggtgattttacccagtcgcatttcattcagcatattagcaaactccggatctcgttgacggaagatgttggttaagagaacggtatgttggatacaagtggtccaggaagcagctgcaaacgcaaattttgcctcccggttgcctccgtctgggactggaggtaattgaaagaagtcgcctgttacaacaagctggattcctccaaatggacgaccattgttgcgcattcgtcgggcaatctcttcgagtttatcaaatagatccccgtccaccatggagacttcatcaacgacaaggactttggtacgcagccaacgatttcgagctttcgggtttttcttgatctgaatgttgttagcatctgcaattcctgggtgaatagagagagactccaacccttttcactaggtcgggcactggctctttgcctagacctatcccagcaaaactgtggagagtcacacccccgatattgcaggccgcaagacctgttgatgctgtgactgcaattcgatcggattctttgcgatatttatatcgcagctgcgcaataatttccctcatgagtaccgattttcctgttcctgcagaaccagtgaagaacatgctctttccgcgctcgacaacagtcttaagaacagcttgttgctcttcactcaagaaaacattgtgcaccttcgaacagttctctggtttcgggtttatgtcgcttttttgcgtcttcttgtattcttgtcgcaactctctctgttccgctttgatggtgctctcggacttgttccatggttctgcaggcctcgaccgtttgggggtcacaaagctctttttcttgtcttcgcggggttcctcttcttctttcatccaaggaagagtacgaggtttcttcgcgggcggttggaaatgagagggcggcgatgacgaccaaggtaactgcatgctgctgggaggagcttctgcttcttgggatatggatggaagatcggggtaattgacatctgttagattttcgttgccgcaaacagaccggtcgattcccaatgtagtgtcaaggcttggatatgtgactttgttggagatggcggtgccagccacactcggcataatcagcggatagggctcatcgaggtccagatcatcatcgaagtcattttcatcgaaataaaccgcgttatgaagggaccccagcgaggactcggccacttcgatttttcgtttgacaccaccggattgtgattgtaattgtggcttcgaatgggccattgaattagcatgcaataagtcggcttgctgaagaggtttcgtgccactgcctgagtggtcttggagggctttcttgaacattttctcgggggctgccgcgggtcgagatgaggatgaatacgcaaatgaactcggcagtctctttgggcaagtcaaagagagcaatcgaattatgtgtatgccccgcgccctggatatggcaacatgcataaaatagaatgcagaatgcaaaccaagacgatgaggtcgcgtcagacaattccgatcgggacgcagatcgattttcggtaatcaacgcgttgcagacgcgattatctgcacgtgacgggccactgataaggataacaacaacaccgcaaggctgaatatggatttatctcactagctttgtactattcattgcctatttaagacgttaccgagattccttgggattgaatatactgtatgttatacgacggtccaaataattaagcttttgttggcaactaatgaccatattatgacaacttgtctgtaatatatacttcgggtcaattattcaatattcacaacacattgacccaaaacaactatgaactacgagttactatgatttcccatgcaattagacagagtgagctagatcatcattgtagttaagtgcaatttgtgtacctgcattcaagtatactccagaatgcgaggggaaagcataccacgtgatcgtcaattaccgcaaaatacgcgggacgagaatgcagaatctagatctttccaaccaccagtcgcaagagtatcttgccagtcacacgatattgaagcagcctgcactctgcgaccatgaggaatggcagggatggctgtttcgagtacgtggaacggcttttttctttcaaattcgagcacatttgctaacaagtcatgttatagataaagactaccctctgacgggtgtagtcatatgcttcacatccgtacaagttgagaagagagtatgtgtcagaaagactcgtgaaactgcaagcacaggctgacctacgttcctattgtacagactccattgactaaaatggcggaagaaatgggcgcgttgcacagtgttcaccttacttcggacgtaacccatttgcttgtaggtgacacgaacagcgacaagtataaatttgtcgcaagggaacggaatgatgtgctggcaatgaacccggaatggatcgaggctgtacgacactcctggacacagggagaggatatggacatacaggcgttggagaaacaattccggctggcaacattgcatggcctcaaaatctgtatcactgggttttcggaccgtgagttggctggtttccacaattgagcatagatcaacgctaacgaatgcgctgcagttcctttccgagtttacatgaagaagacaaccgaggagaacggggccgaatataggaaagacctgacgaaatccgtgacacatcttattgcgcgcaactcggacggtgaaaaatacaaattcgcgacacaatggaatatcagagttgtttcggtgaaatggtttacggatagcatcgagcgtggaatgatcctggacgagcagaaataccacccgctggtacctgcagcagagcaaggtgtcggggcatgggatcgatccgcaccgacagaaagggagccttctcggaaggacagcactaccgaagagaactctttgaatccgcgacctcgaaaactacgcaggattgcaagtaccaagctggtagatcaaaacgaaagcatctggggagatatcgtaggaacaggattcgataataacgagacggctggaccccaaaagaacccaccacatgaagcatcgaagcctgtcatacaggcatatcagtcattcgccagcgagactacattttctgaaagcacccagtctcggcttccgctaccgactgctccaccaaaagacaatggatttttacacacgacttatttcttcattaatggattctcttctaagcaggtttgtgctcatcctcttgtccacatacccttgaaactaatgtatcttctagactaaagttctacgtgagcatctcacttataacggagctcaattagtgggctcactaaatgagttctctagccctactattcccaaaacagggcatgggctgttcatcatggtgccgtatcagactcctaggtcagaaattccgtcaacggatgaaatggcctttgaatgcgagatcgtgacagagatgtggctggaaagatgcattgatgctcgagcttttgttccacccgagtctcatgtgccaagcactccattccccaaattccctataccaggtgaggtcccatcaaatgcaatattcatacatgctctaataataataggatttccggaattgcgggtttgttccaccggctttggacgtattgatcttttacacctacgcaaactggtagagttgatgggcgccacatacggagattttctaacgccaaaagcatccgttctcatttgcaacgaccccaaaacagccagcgttgacaaattgcggcatactggcgagtggggggttccagcagtgtctgctgactggctttggatatctattcaaactggccaaaagaaggcattcgagccataccttgtccgacgacaattacccccaagtgctggcagcacagaggaactcggttctttatctgctaagcgaaagcagcctgacagacatcttaatgaaacgggttccccgtacaacatctctaccgagtctatgaatggtggtagaaccgaaaagcaaaattctggaaagagcgctgcaagtcgaacaatacccatcgtcggcgacggctttgaggccgatgcaccgaagccctccgtgccggagtctcgatctccaaccccggccaggataccagacgaacaaaccgcagtggaaccgaataacaaacagtccacgccaaatactgacccggcaccacccactggtccatccgcactggatacggctctgagcgggctcctacagcaagcccgcgctgccaagtcacgacaccagtctgagaacaccacgaccaatgatgacgaaaatccaccccgacgaaagcgcaagcccctcctcggccgcgccccgtcccactcttcggcgcgaatgctggaaggcccgcggcctgtctcacgcgccagctcgatcgatacactcaacgacgatggcctcggcagtgccttagagagcgcccacccgaccagagccaactccataacccgcagcaacagccgtgtcgaacaaagcctgtcatccatgctcagcgatggtaagtttgatttcctgaatgacaaactcccgacccataccgaggacgaagacgaggaaaatcaggcaccgcagatgacgcagctggattatgaagatcccgatgcggctgccatgagggcggagttcctgaggggtgctgggaagttgtctggtaaggcaatgaaggccgatagctcgggtttgcttgtcggtgaagtgcgcgagcttgaggatattgggtggggttctgggcggaggacgaggaaacagcctgttaaagtggacgatgaatgatttttgctttttatttttctctcggcgaaggcatggcattgcattgggaatggcgtcgtcctctttggtccatacattgttttgaaagagcgatatataagggttgttaatgataatccaactcggctctatactaagcaagctacatgtcccctggcctaagctgcatttttgatactagatattttagggataagaaggaatacgaagggatcaccaacaggagatattttgaactagatgcacctctcaatcgcttagggaagttagatgtgttggccactccgaacgatggttgtgctttgggaaccgtcgagggctacctgtagccagcggtgattggaggttcacacgtcgatgtgaaagatggactcgagctagcgttagaatgattgcaaaggcacctggcttgttattctcgtcgattcactccacagatcggtagaagatatgcacagtctgatgcattctgacgtgctcactgttgccttatgcagtggggttgggaatatcttcagattcgctacttacaaaacatggtattaagcggtgtcgaaggcagtctaaaattggtgagaactatccttaactatccagctttgctgttacaattatgaaataaatcaggtggcgcgcactggcagagtatgtcatgtattctataaaccacttcaaacaacaaaatatccgagaaaaagcatctcgagcaatgggaatacaagcattatttgtacgcaaattaacacaatgtaaaaataaccaaagtgaacaactacacatgctaaactattcacttgcccttttgggcatcattatgggcagcaccctcatctccctcttcttttcccattcttggtggtgaattatggtcagttccaccacgagaaagccactctagagaagatattgaatgggccgtatagtcgaagcttcaagaacgaattgagatcatgggggttctgaggtttgccatcgaaacgcaaatagtcaaggtattgcgagtgtatattgcgacagcataaaatgatacttgccaattgggttggctctggtacctacccgaatggtaaggcgccattgatcattcatcaatcgcgaatgtgatgggagaagaagtgatcaatcaaaagtgataatgataatgatgatgatggatggaagataaagacctagctactgccatgaagctctctatatagttccatgctacaaagccaccagattccatccttcagaaaccagaagaagcatctctgcaggcaaacaaagaaagtgccaacacagcaagctaaacgacaagctacctgtcagagaagtgaaagaaaaggaaaggaatgccacagagaggtttacaatattacgtgctagctagttactaaagcagtttctcaagtagttgctaaataagtcgctaaagtaattgaagataaagcagtaaattaagcagttagaggcaggggggagaataagccagtaacaggggtactttgcgtagcgttagaagttggaatcagtggcttcgctctgcaacgactatctggaggccttaggccgtcgagatccctagtatacattcgctctatactgagtcggaccttcaaatcggggaattgacaggctaagcaacattagatggttggattgtataaagtacgaattttactgtgggaaaaatgagtcatgacgcactggcggttggagactgccatactgggcagaaatgattgtaaagccgatgtgaaggaacatcgtggtaaaactcaatagaatatggagaatatgcaaaggaaagatgcgcactgtacaagttaggaggcaagagaaaacgagcggaaaacaaacatcgtaggaatcatgagtggttgtacaaaggtgaacataggcttatgcttgcattgccgcagccattcctccaggcaagggagcatcaagatccaaattctcgatagaacggcggttctcgctactgtcccggaacaggttagagaaatatttggtggcaacatcactctcttgcttgattttggtgacctcttgcttgcgtttgccgagatcctcaatatcctgagatagacaggtttgaagattattggcaggcaagcgcaacatgcggcgaacttcagtcgaaattcgattggcatttgagtggacatagtccatctcagcaagggtggcggcgatcttccgcgacaggcgtgggggaagggtggtcgggatggagctgagcacgtaagctgtggtcagaacagcttgtatgaagttagtatatgattgttctttgtgaaaacgaataggcaaaactcaccagcagcgaggagactagggaagaacagccggcgcatgttgttcgggccaatgactttgacagcactcaaggcactatccacccaaccgaatccgcccaatgccctaccaccaagtacagtgactgcagtcattgcaacgcctgttcctgccatcttctcttggcgctcccagagaccagcaaaatcgaagaaatcccacagctcaacttcagtgtcgacctgtcggccaaatgtgtggcgacggccacggcggaacatcgcatccgcgcggaagttgagtggggtaaatttgtcttcaccaatatgcagaagaccgatattttggatgaaaccgactccttgaactgtcttttcccgggcatagtcctcgcagttgttgacagacgaagcaatctcatccagcattgccagcttcagttcctcagcgtactggaacgctgaaaaaagaccaggatattcaacaccgaggtctgcatcagaaacacgtgtgattgtgttagtcaatgtcgaacgagtgtgattgtagacatcatcgcatgaatcgtcgatagccttgttgacaccctctgcaatctctcccttctttttcttgccgttctcgaatgccggtacaagctccgccaattcatcggtcactcgcttgagctccgactgagcaacatcgcggttgactgtggcaagagagccaatgtcagctaagagattcaggagatacgttttggcaggcgcaagcttggaccgagagcgcttttcaaggacgaaacgtcgcaaggctccttcaaggttctcgaagtcttggagtttctcccgttctttgcccttgcccttatctttggagtccttatcggcgtcgtcatcatgaggatcagagccaccgccgtcaccaccaccggagccagactgcgagaaggctgaaggtgcaacaggtatagcattgctcgaaacgaaatgaactagctcagcagcctccttgtatgtgcgagggctgagtttgccgatctgatctaagatcatgcgttcgcagcgtttcttgtcgcgaatttggtcgaatccgttgactaccatgaaaatatatgccttctcatgtgccgcattcaagatgaattcttttgcagacaatgtgaagtgatttgcggcggaaaccacaaacacaacgacgtcgatctcctcctgtcgagcaaagacagccgtggttttcaacgagtccgagtttaatccgggtgcatcgatcaaagcgatgtcaaccacgccgttgttcagcaatgattcgtcaatagaccgtacatccctgacgtagactttgcactgcatgtacttcgtgttttcgatgacgatattttcgagttcggtgagagcatagacatcgaaggtactttcgtcattgcggttgtatggcgtatctttatgaacggcgtggacttcttcaacgctgcaattttcgcgagcatcgagaacctcacagaagatgctggtgcaaggctgttggtcctctggcaacacctttcggcgcagtagagcattgcagaatgtcgatttgcctgcgttcaagtctcctgtaatcaggaccttacttgaagtgtcctcaattctatctcgcagcgaaaggagatgcttcatgctttggctgatttttccatccaacagggcggcaaccgatgccttttctaaggaatgtactagctctgcctgcgaaagagcgccgagcttaagatccaatttgagaatagagaactcttgcgcaatctgcggggtcatcaatctgggctctgtcggcacacgacgttggaccgaggcacttgattctcctaattcgtcgctaactgccaaggtggctgcacgcctcaggggcggggtgctgagtatgttatcattgcctccaaattcggattgagtttgatgtagtgacggtcggaccatgggggaagagggtgtgctccccacggagggatagtgggcgggccattggcggttcatttcctgaagctccttcagtgtgtcgatggtccgggatatcgcacgagcaagcttggttcggtttgagttgctggaaaatactgtaagccttggacttgcatgaatgatttgtttacggggaggggagacatactagagaagttgagagacatgactggcaaccacttgcttctcatgctcagctatatcccaagatgaattagctcaattatcttccctttatatcacaccattccatgtccgtggccacttacctgcgggattccattctccagggcgcgttggagtatgcaccggagtcggcctatcctccatcaatcctgcacgccaagcagagttcgcatcctcctccgtatcagcaatactgcctccatagccagaatcttgattgagcgaagtcatcagggctgtggcactgtccgaagtcgaaccgttgcccacagtcatataagtcggtgggggacggaaaaaaggattcttctgaggaaattcttcctctcctgagaacctggacgagcccgccccggaagacgggccttcaccagggtgatattcctgactcatgacgaatgaaagacctcaacgtgggggcgacatccatacaagagaagttgtgtttttggtggtttgattatgagatgatcgatttgtcggaaggtttcagatgacgtcgggccaaaaacggattagcgtgcatgtgacccggtatcatagtaatgcgcctgtaatattaccataccgcgattgatgtcactatctctactcaggctcccatattgtacctggatttacttcttacctcgaaccgactgcccataatcccctgcaatcatgaatgtaagctgcatattgaatgcttaaacatggatattcactcacattaggtctcctagattgtcgagtgggctttcggaaagcgcatgacccccgcagagcgtctgcgtaaacaccagcgtgccttggaccgaacacagcgggaacttgaccgagagcgagtgaaactagagaaccaagagaagaaactggtacaggacatcaagaagagtgccaaaaatggtcaagttggtgcctgcaagatccaggccaaggatctggttcggacacggaggtcggtttctctttattgtttactgatcaaagcagcattgactgactgcgacaacagatatattcagaagttctatcaaatgcgcacgcaattacaggctatttctctacgcattcaggtatgcgcaagctttcctccgctatccctcttggttccgcgatgcgctgactcttgctgcttcctagactgtccgaagcaacgaacagatgatgcagtcgatgaaaggagccacaatgcttctgggtagtatgaacagacagatgaatctccccgcactgcaacggatcgcgatggaatttgaacgagaaaacgatgttatggaccaacggcaagagatgatggatgatgcgatcgacgaggccacaggaatggaaggcgaagaagaggaaggagaagatatcttgaaggaggttttggacgagattggtgtcgatctgaaccaggcggtttgttgccccaaacattggaaagtggacccagcaggctaacatattccatctacagcttggcgaaacaccccaacacatacagaaagcaccagtgaatgaaactcgagttgcgcaggctattggagggggaggcaatactagtgatgatgacctccaagcaagactggacagccttcggcgatgattacgactcttctctcttatatgccattgatgacggaggtgataatgcgacctgctgttttgagccctaattgagattacttgccttgctgttattattagcataccttggaagatattctaaataccaatccatttcctttcaacctcttcacatttctctcaataggtcaagggtgcctagccgtgaactagatatttatacataaaatcgcattttggctacatactgttgaacaaaatggtgactgttttctattttctatggtacgagtaataggacagcagatcgctatcaaactcaattcgactcccagatctaatactccgcttgtgattgaaacaccattcccgagatataagattggaagctttaggatggtgcctcttcaggagggggaacttactcatattcacaatcatcagatgcgctagaagaaccagaggaattatatctcgggctgttgaggatggggattgatataccttgatcctgtgatatacttggccatggaaaaccccttcgaccatctgcacgggttttatcatggaatttcttgataaagggtcttttcgaaggtcgaccagactcgagttcttcagcagaccagcgagaaaaccaaggaaatgacgatagctcttccaacgacggccggtcaaatttatctctagccaatgtggcttgcagtacatccctgcagtcctgtgagagtgattcgctaattgctacatcctcgttgatcattctcttgcgtctgcgtttgactactggatagaacaggtcattgtaagagccatcatacctagcgtgccagttcaaactcctcggcactggtttaggctcatcccaggcccagaagccatgcagaaacccgtaaaccagcgttgaatatttccacaggcaaatgtcccgctggtcaacaggtaagtagatactttcgatagagacatcatcgtgggatggatccctccaaatgtcgtacttctccagttcgatggctcgctcgggcatcatttggtactcttggtagggaataaagtggtctattttcattgcaaaacctgatttctcaagcgagaagtagagcattccaagatcgattagttgaacgttgaggttttggtccattaggtaattcgtcactgagatatcagcatggcagaccttcatatctgctaattctatcatagcttggagaagctgagaagcaaccttgcaaccttctatttcccccagttgaggttctttggtggctgcggacataagatagctgccatcaaaagatggaaacggggggtatctctttcggatgcgcggtggtatggccccctttgacttgatcctgttgaaatgaccctcatcaataactgaaatggcttcatagctaggatcaacgcagggggtcatgagaattgctgttagcataccgtgagtgtagaccgagttgagccgcgggaaccttggactatcgtcgagatagatcagaagaagtgcttcttctggcatatatcttttctccccactagcctcatagaagggtcccatctgagcattcacacccgataatgtgtccatccattgtgttgtgtggatttgagatttgattgcgaattgttgaaggtcctccagggaagcaccagcagcgcctttctcgcgagcaataaatgtggcaccaaatgctgtgatcagttagcagtatatccatgaaaaagacatcacatcaaggggaggatggacttacttcctgcgcctatgaacccatatatctgcactcgctcgataaggtgcggacaaaggcatactgctttcgcagtcgtccgcccctcagcacttaaacggatgaaatccccatatgaagtggagttgcatttttgaaactcttcgctgtcgcacctatgacctgaatcgtcccggcaattacacctcgagaattcctcgttattccgtttgccaaacgctacccctagacgctctcgaagaacctgacttacttggggatacctttcggacaatcggcttgaggggtctaaaagtctttcggcattgcaagagaagctatcatcgtagtactggtatttgaattcgcgggcctgcgacgatggatggtgtaaagtatgattccccttgattgcgcccaagtctctccctaagatataatcaaaagcgtaaggatcctgttcattaacgcccatctgttcagtcatggcagttgattaaattagtcaaatagacaaaagtgatgagtgcagtgagggaagtccaaggagcaaagtaggtcgtttatataaaactcccaaagaatgttcaatgtattgttctcagaatagacaaatgaaaggaatccttcgaaacaattcttatgaatatcaaagagttcctttttagaacaataaacaaggaggtcacctgtaacaaaattaagccactaaaatcttatatttctcagatgatgttcgtatccagataatattcacccgggcgacttgggatagtcatgaggctgaagttgccttgttttgagcctctgcgcccgggcaagaaacgagaatcgggaaagagaaaagtcaagtatacgagcaaacaagatacataaataggtgtctatattctcctcaaagagtcagatttcttcaaacagccgactttcacttcaaaggaagaaacaaagacaatcattcaaccctctgcccttaccaacaacaattcgatgcaaacctcaaaggacaccccaaacacaaacccatcgtttccggtcggccatttgcgatatgaccagaaatgttcggcctccgattcagcaagtcgtgtttacgagggcttcacattttccaaggctatgctcgaacaaagttccacatggatctgtgcgaaacggacagacatgcatcggaatcaagacgaatacttcaaaatggttcatgagggagcaaatcaacagtctgtagcgcagcaataccagagcatatcctctgatatcaggcgcgctcatgtgaatcaactgattgccgaacaaaggcataacaatccactcgttgagtggagttgcgtctacgtcaaagaacacacgcagatgttcgaggccggaaattctcgttgcgcttactatgagactgtatctatggatgtcatcatcatgcaaagaccgatgaagacccaagtacattccagaacctccatgggtggtctagtggctactaggaaaaccttccggccggatacaaagagttcatttatgtgctctcgtcacagggacatttctctgacgccagatcaaaatgggaagatcaatgccataaacagcagcggcatgagtcttgaagatactttagattgttcatcagaaagtaatagcgacccagatgatgcatctatgctttctgaccaatccgatgaaacatctgcaacagacgaccgagaaagaatggagaccgagaccgagaccgggaccgagactgagtgtcaagaaccgcgaccaaatcaggtctttgtccaaaaacagaatgccagtccttatcgacgcgagccgagtcatggacttcattttcggcgaaagtcacaaggatgcagcgggagccttgaaagaaggcatggcaggaattatctccgcgatcagtttgaggtgtctccagtcaagattcttggcccacgatgggctgaaagggtttggtcaggctcggtgcctagtagaagatatcgaatgcaggtgatgaacgacaatgagattcgaagccgaatgcttgatcaccgtgaagcatgtcttggacatcgggagcagtggctgaagagagccttttctgaagcgcgtcagcttgagcgtcctcaaccggtgacagatctgccaacagtgtgccgctgtacctgtcggtgcgcgatcaaggaggatgtatgacagatatattattttattttgcatactaatttgatatggctactgcttttttttcctaccatgagaagaactgtttttaattgcatcattagtttggaatagtcagatttatataaacaaaatttgatcagtcaggtttactaaacgatacacccttcctatttagtgctcatcctggcacagacccacattgagatagtccccctgtgctgcttatcaagtcgtaactccatacctcttgctgcgttgctcaattgcagatctagcggttgtttctgcctaggaagcacattacaagaatagcaaggataatgtacaaaacgcctaagtcgaattagaaatgcaccacttgtgttggaagggatgacttactccaagtcaagctcatacaagtataaccgaagtgttccttgagggatccaccgatgattggtcccagaactgtcccaagcgatgcagcaacatcatcaagagagaaaacacgcgacatgcccccttcaggtccgaagataccaggtgaatcctcttgataagctctcacaatggctgtcaagagtcaatagcaaatactaaagtcgggataaggcagcactcaccggaaagttcgacggggcccacattcgtggtaaaaggtcgcgctgcaccaatggcgagaatgcagcctgtatacaacgctccacctccggcctgagtaccggtccaagggagaatgttggtaccggctaggcccaatagcccaagaatcaccgcttgaaaacccgcagaagccatagcaggataccggactccgaagcgatcacgcaaccacccagccaatggactgataaacagagttggcataatgagacaagagaacaagaacccgctttttccggggccccagccgaatgtttcttgcacatgaatgggaagggtagcatggaagctcgtgccaaccgttgttgtcgacacggcaacgaacaatgcagtcagcgctcgaacatcagtgagaataatatgccagaagttccctgcggtggatggagtttgggcgttctcgggagcgagtaacgggctggtagtgtcatgcgtttctgatcctgtcgattctcgcttgcaattagaattctccactgatcggctttcgatcatgataaaacgcgcgccaaaatctacagtgagaagcaagagcggcaatgaccacgtcggccaatagcctacaagttccaagagcaaaccagaaatggatggcccgcctattaatccagtatatatgaaggacatcattaagccctcaaccttgcccatattatctccacccacggtatcagccacggtcgcgaggccaacaatccatacggaggatccggcaatgccctgcatcacacgaccgacgaagagaacagcaagcgaggttgagccagcgaccatgccagtaccgatcatacacgcgacaagcgatagtagtagtgggagctttcgattcgaggttttatcagcgaagtggccgatgatgggacctgaaacaaccgagacgattccatgcacggcgagaacaagtgacgtgagttcctggatcctggattgattctcatgtagtcgcgtacgaagcatgtacggtaacataggcacaaggaagccatagaggaatgtttctatgcactgtcagccactggctcaacaagagggcacagggtacacgaaccggcgaacaaggcaattgcgactgtcgagagaataaaccatttagaagagcgccaacggaagcctataggcttactactggcatggacatccctcatgtcgacttgagttgtgagtagtaaagttcaatgccatgaaaatgctataggaatatcatcatcgctacaaaagcaaggtttgacctgcaggatcgctgatcctcagctgggggcagttcatgcgacgataatgcagggatagtgcagccgtatcagactagtattgcccagtcttatagactacgaatcggactgaccgggtctgcagtctccacataagatcgagggtgaaattgaaatgacttatagaactgtggagacctgagggttatgctttttgctcatacctattggtccatgtctcatccaactcgtactaaagtagatgattctattcttttttcctttgaaaacaaggctatgaatgtcccagtgttcagaagatagtacttggtacatgcgtgacaattgtagatcatcgaatatcgatcactttaacattctaaagagctccaagtaagacgaaagagcaggcatcatctgcccatctcgacctgacagcttcagctaatctagtcttgtgtcttgtcgatgaaattaatcactttccgtcccgtagtgcttctgatgaatcccgaataatcacataggtatttcaaatcgaagagctcttcgttgttcccaaaaacgttgaagaattttcgtaactcctgtgtcagttcttcttcgccaatcgtgcctggctcatcgtgccgaagcacacgcagctcaagaacaatgtcgagatggtgcttatctctttcattatacctccggatgatctgatactgcaaaataccccatgactcggttcgtagtgcagcctggacaactgggaattcgaagtactcgccgtaccaatcaaagctgattcttcggtcgcgtccataaatccgcgcgactttgtagtgaggtgcatcttccggtgagattttggctttgatcaactctggcaaggagtggagcgagcaaacatcaccacagacatagcggatgagaggatgacgcagtctctgcagcgaggtttgcacaagcagccctttctcgccatcaggaagaggccgaacatcgacattgcatgggtcttgagggtcctccacagcaaaagggaatacctcaagatgcatcagacgctggtcatacacaaaatcggcgaagtgttgctccttcgtggtctctgtcagctcggctggcgaagcggcccaaggcccagcttccgcactaccaattaccgacgagacagctatattgggaaagacagagttcaaaaagctgcgctgggccggggtcattggctctgaggtatacagcgccttgtttatcagcagttgccttctcttgtcctctgagagggtagagatgtatcgcgctagctgaatgatttgtcctgcgtcaccggaaatggcatttactcgatatccaatgagtgtctcgatcatctggtcttgctccatctggctgccagcacaaagaaccgtggcgccagacccctcgagcacctcggaaataaggtccaaagccctgcaagagttaaaatcagtttttccccaattgaatgaatacaagtcaaaaattacctgtaaagatgtcccgacacgtgcattgtcatgatccagtctcctggtcctgtgatcccacaagatcgcaagagagatccaatggctgctcgttgttgacggatctctcgcgaatccgtcgcaaagaccattggaggccctccaccagatcctccaccagtcgtgctgatgtaagttccttgtcgatatccatttcgagggtctttgtcagtggtaaggcgagcgatctccttgtatctagcacttttagctatgcaggaaagaaatgaaagcgggaaagcttacagagcttctttccgggtcaatgggaatgctgatagcttgaagtctgttgctgactctttttgctttgctagcagaataggtaaatcttcacttttcgttggatatggagtgtcagaataaaacgggtggatactggcaatggccagaatatcgcccaagtcgaagcagttcgtcatcttcagataagacgcaaacttcaggtatgagcacagtgcatgctacaatcagcaaacttgagcatttatgagctcaatatggaagtatttattagtcaattctataggtaaagtgggttctggtggcgggaggtggagtacattattcaatagtagcgtcgcgctaatgtgcctataaatgtggaccagatggagacccctagggatgcagatcgcctcatgcattagtatgtactagtattcattagttgtatcaataccggtgtatttgactcaaaaacaccagtgaggtatacctatatcaagaccgccacttaagaaatgcagccgccagaatatcatgtccatttagaacaacttttacatcaccgcgggcgcaactatgaagaagccagtgaaccattttagcagtatttgctttccccaaagtggtgaaaatttctttcacccagcagatattgaccccgagactcgatccgctctacttgagaagtatcatctcgagctcgagaagtgtagccgtcgggagacgtgggctggtgatgcccaccataaatcggtgccttatccagtgcttggcaacgaagctcatcaacgtcagctttcagagctaagcgaggcattggttctagcaattaccgatattgtggaacgatggtggtcggatgttgaggcccgctttccaaagcggatgccggtcgaaccagttgaggaaaatctgctgcaagtgagtctgaatccttggaattttgttgattcttgctaaagtggtttagtggatgcaacaactggatgcacatgtacttcgtccattcagatcctgtcaaggctcctggaggcccgattttctgcttgaatcgtcggatgaccccgagcggatcgagaattatcgaatctgtgagatcaacgctcggttttgttggaatggattcctctttactgcatttggccaacaggcccttctgaatatgggtgtcgagcaatatggtatcaagggagccacagacccgcaaaaggtcagaacctcgcgtgcctatacataatagatactgatacagtacaggtcattactggtttgaacagcctttttgattcttcactccccttacatctagtcaagggggaggagtacggatacgatatccacatgttcgtcccatatgcacagcgttgcctggggatggatgttaaagtcattcctcccgagagtctccggttgatacccgctgcagctcccggtggatacaaattatactgtctgtctggggaaaataccaaacagccgacaatattgaatgatgccggcgagtctttagaagaagtgcatcagctaggtgtggaactgcatcaacgagagttgcttgccatgagctttgaaatgcttcagcaaatcagcctgagatgtttcaacgacctgcgtactgtgcttctcgttcatgacaagcgcatgttaggcttagttcaagaagaactggattcactggttgcacgaaacgtactctcgccgcaccaagcagggatacttgataaaggacttgtccacacgataatacccggatcagacaaattggagcatttcatatccaggtgccagacagacgtctttaccaaggacaactatctgcttaagccagttcgcagtggtaagggagcggggatcttatttggtgatcaggtcacacaggaggagtggatgtcacttctccagggcatgcgagatcctcgcctaaaatctgggaaaacaacctatgttgttcagaagcaaattcaacaacggatatatgatgttctgcttgaagaggacgctggagttggaaactttcctcttgtcggaacctttcacatcaccaatggcgcattcctcggccttggactctggcgaagcggccccggtcgaatttgtgctttaagtcgtgggggagcctggatgtgttcagtgattcaacagtgacgaagactgatttccctggggccaatactgttcgagccatctcatctcactatctagtctgatttcatcttacgctataagatttgcccttttgttactttggttcgatgaagatactttcagaaatgaccaggcatgcctaagatcttagatgggctgcatgtaactagcttaccccgtataactaggtgtggactatgtgtgtaaggtccatgtctctgtagcatagactagatctacggagcaatcaccgagagtgcagccagtgcatcggcctccgccaattccgaatcgtcaaatatcaacctcacatatgaccgtattggtacatgatacacgatacgataaatgtcagcttggttcagctgactgaggaagcgtaggtaaagcagggagtggcgtaacaagtatccactcctcacgattgattatgggcatgagaagaaaccattagcaaacgaaaaccttctttccgacgcatccaatttcctcgcaaccgctaaagcagtgagatctgcttgcatatggagaaatcatactttagctcagccgtacttggtataatgtcgtgggtcaatttttgttccaggaatgtggaggtggctcgcgagcaagcatgatgaagtaggtgcgagggatgagcaatcgtcggtatatattcaatgtataaaacactctggtacccttggtcctcgccttcttccatcctatcatcattaataatggctacaatccaacgattaacgagatctctccccacgacaaggaagcaagtcgttcaagtacctagaatatgtgagctttgagtccacactcttctccccatatttgctaatgaaaattgccattttggacctatagcacgtctcacagtctcgaatcctgccactgcttcccaacatgaccacctgcgtactgtccatcacacccttcagagtgccggcgttctacaaatccaactcggcttccccgatgacgaaagcacttaccttcacaaactattattgaatttgcaccaacaccacggccatggactaccgatcacacacagtgcaaatcgaggttggatgtgggacattcggcccagccccgaaagcttccagagcaacaatactcaagctcgatctgagaccatggaagaattcccttggcacacagattgcagctatgagagctctccaccgcaatacttcgctctccaggttcttcagccagatcgatgtgggggcggtacattatccgtcttgaatgtcgacgaattgctcacacttctctcaccttccacccttgagaccctcttcagccccaattttcagatcactgtcccacccgagttcgtcaaaagtcaggcagatacacagatcgtcggtggcctgctggcaattagccccgagacgaacgccatcaagctccgcttccgggaggacattgttgtgccgctcacaaatcaggcatctgaagcgctagctgaactgaaatccgtcctgttgggcccagcagcccattcccgaatactcaacttgagagccaagaatctcccgcgtgggtcgatcattttgatggacaatggacgctggctccacgcacggaacgaagtcaaggacccagatcgacatttgcgacgagtgcgttgggacgctcggcaatttgccagaccttccgctgctcatctaggtttgtaattgcgccatgagataccaagcctgcgctcagcatgtttggttgcattttcttctcataattgagattatatagtataactcaatgcatttccggtgtcattgtcacttgcctatactattgttttgaaaatcaaaatcctttctcgcaccatctactatgtggatcttctaagcccgattgggtttgttatccagccacgtaccttccacagtggccgaacaatgccgaggaatggactcctctttcgatggggcttcagctgtaagaacacgggttcctgacctgtaccttgacccatatatatgggttcgccccgctggatcagatttgtgttttttttccggtggtacagggtctatctcccgcttgcaaagtctggatggcatcggaactgcagatggcagatcgaaagcgatcgacacaaagttcctggatttggtagcatattggcaatggcaaatgcccctggcgttgccatacagtgagtgtatgtactccgtatttggcggtactctatatagttaccgccatatataccgcccacttgttaaaatactaccataggttaactagttatgtgttatagaccggcagaactggcagaattgaaatagcggtacggagtacggagtactccgtataatgcaaaatccttcccaacacttcagaagtcccactgtatatgcgcgcagctcgcttaaatagaaagacaagtgctcaaccaacacccagtcttcatatcacatgcgtttcctaatactctgagacacccccaggcttgattccagaaattatctccacatttgtatgttgcctaatccgtgagttggctcttgctgggaaggaagctcagggttcactgcactctcggcgtactatattaccttggcaaataaccaatgtcttggctgaactcaatgttacagtttgtgtgtgtataatttactatgacccatcgcgggttgaatatcacatcacgtgacatttatagatccaatgactgacatcttccttggctaatattctgactactttccttgactgctgtgtggtgacatagaaagacgaccccgatcttgggaggaagtgaattcaaattcggagaattcttaggcgagaactgagacacctttctcaagcatagctatcttatattatccgtcggaagagcataactatctgaatagtacagagtgtctagtatcaatttgcttcgctcgacatcgcagctgcagatctcgcgtcctccttttggaggaccaagaaaaacaaggaacagatatactcgagtttgaataatgagcagtatctattacatctttttctggagctctgccttcaggacgacttaattacctagtttatacggcagtagcccctcgttgaaccggaatttcggttatttactttcaagtttgttagtggaattctaaaatcgttgtttgcgaaatgtctactccatgcattgataatgttggagctgtcacaggttggaaacactctagtaagaatgggtctatacccaatcaatagtactaggaggagcgctccgccaactattccatgaagacttcaggaagagacaagcaactgcgtactgcaaggagagctttccttggacaatagaccaaaaatttgccattctaggaacgtctagagtcacttaccttgcacaatagctcacatcctctcgtgatgtcttttttgtatgtcttctgttccacaacgataaaaggaatagaaaaaggcgttaggagtggctatatcatctcgtgataccattgtggtcttagagcaaacaaataaaactcgtgatatgtaattctgaagactaaggccgaatttttaagtatcttgcttacagctctccgagtatgagaataagacataaaggttcagaccaaaaacttcatatataaatggccctgtcatctaaattactggctacatataacactctggcgtctttcccaagcgctgcctacttgctacttgtataaatcgcccaagattgttcaatccctcgctcttgatcatcactgataggctcgaaatcaacagcgctggtatcttgttcatcctttagtgcttgcctcttcctttgagagtggacacacaaagaaataacattatctcttgtatcgtgcttggtttgagatcgacgataatggcagacatcacgagcagatttagatagccgctcaacgaggaatcgagagcataagagatatgatagttgagtagtagacaaatcgagtctgaatcttttgaccttgaccatcattagttgtaagcttaagggtcttgagtgcattgggggtaacctcaagagtcaagaccctccgatagacttgtgaaattcctcgcatcatggtcgaaggaagtggctttgacaagatgggctcattcgatcgtaagatcggtaaattgaaaagaacagggacaacgaagattattacagggctgattgactaaatgttgagccaattgatgggatgtgaacctggggccataggaagacagtagcctcgcctttactgtgggtttagctttgctggcatgttgggccgcagtatgttgtaggtatggtaaagtactgagtggaggggtctttctatgttggaggggcattaagggatgacgtaattgagcgctaaacccagagaagcaaaactaacttgaaagggaaattcatcgtttacataaccgatttactttcccagagtcccttctcccggccaagtcttcttcttcttccatagctatcaacattcctgaaacttcttctttctcttttccatcccctcataaactttcaatatgcctcgccaattcttcgtcggtggtaacttcaagatgtacgttgtctcaagctatgctaccccgcggtctcaagcccctcacattttaccaatgcctactcgttcgcgcaattgaccctataaaggaacggtgttgctaagagcatcaccgaaatcgtgaagaacctcaattccgccaagcttgacgacagcaccgaggtcgtcatctctcctcccgccatctacctcgctctgacccgcgagctggccgaccccaagattggtgtcgctgcccaaaacgtttacgacaagcccaacggtgctttcaccggtgagatcagtgttgagcagctccgcgatgccaagatcaactgggttgttatcggccacagcgagcgccgagtgatcctgaaggagtctgatgatgtatgcataccccgcagtccccgaaaccccaatcatcctcaaacactgcagccgaatgaagcatcaactaaccactgccccaatagttcattgcccgcaagaccaaggccgccattgagggcggtgtctctgtcatcttctgtatcggagagaccctcgaggtacgtcattagaacccggttttcccattttcgttccgatagtgggtcatcgggtccagatcggctatatgtcttctgaatgcatcccgctcacacccgattcttatgtaggagcgtgaggccaacaagaccatcgaggtcgtcacccgtcagcttgacgctgccgccaaggagctgagcgcagagcagtgggacaaggtcgtcattgcctacgagcctgtctggtatgaacttatcgcattgcttctaaatcaacatacccctggacatatctaacatgtatttgtagggctattggcactggaaaggtcgccaccactgagcaggctcaggaggtccacgccgctatccgcaagtggctcggcgaggctatctccgcccacgctcaggagagcgttcgcatcatttacggtggctctgtcagcgagaagaactgccgtgagctcgctacccagcccgatgttgacggtttcttggttggcggtgccagcttgaagcctgcctgtaagttcttagcacctgcccatctaccgatttgttcaccaaattggtactaaccaacttctacagtcgtcgacatcatcaacgcccgcatctaagggatttccgaaagaaaccaatacccccatagtgcccctatcatcagagcaaaaagctctgtgatgtaggcgtcagaagataacagcttggaaattccaggaaattatcacgaatctatgtacatttctgaagtatatttcgataacacataatcgttgctacccagcggagcagttatttccttagccaaacagactgcccaatgatatgcgcctagacaacacatgtaacctatgaagaatacaacaccgagaccccaaccccccgccaatacgacatgccaggacccccacctccactctgggccgagccggtggccgaaaccgaagaagcagaaggcgacaatgagaaggaacccggacctagcccaacacccgcgctcactagaagctccttaacacggccttcccagagaagccgcacattccaagattggtcaatgcgcagcttaatgacagaatcacttgtctcggcctcgccgtgagcgttggagcctacggggccttcaggttgagccgggtccgctagaagcggggaagccggtgagccaggcagggaaacgctgaagtcatgcatgcgtactttgcggcgggcccattcgagatcgtcgtgactgggggagctgggattcttggattgacgccatagctcgcagccggcgaccatttcactttcccagctgtagacgttaaagccgaaacgagagctgaaggcaaggttaggcgaggcgcggagggaatatgttgtagataaagagcccacaatcggggccaatgttagtgttagagtgtaggggaaggtcgatataggtgtccgggtgctggaatgtgatgatgatggcaggacctttgtggctgcgggtaatgtggtgaatcgcaggccggttgacatgccaatcagtgatgatatcggggaatagtacgcctctgcacctgcggacaggagggacgatggcggcgggacgtcgtcgtgaatgtatcgaggatctgggccgaagttccagagtccgcgccaaccgaacagggcgttgtctgtgctgaagaggtactcattgctgtacttgcccgtgtcgtgggatagctgggtgagcattgaggcctgtggagcggacttggattgcggtggtccccgagttgagcagacagctagcgacagctgcatattcgtagagattctgcgtagaaagagcgcatatagagtggagggaggtggaagatggagagaagcatggagcagagtagctttacgctttgcctcgctttcttcgctattttcgctattttctccgtctttaggatttggtggttctgggtggcttccgtctgtgagcccgggaatgctaacgccgtctaagagcgagtcatatccccaggtctggattggggccgcgggggcctgcacttgacggtatcccgggcatatctttcgaagcgggattgacgcacttctgcttggtaggtcgttaaatggcacggtactaaatagatatgacacagatccatcgagcaagccaacggtgccaagtgtgtaactggtcgcgaaatggggagtggacagtgacgagaggtgaacgcgcaaccgttcgggggtcgagaagtccaggatcgctgtaacaactgtgttaggccagcaacttccatgccccatagagagactttggggggataaatcaattacatacattgagcggtggtgttgagtgacgagtacgagttgtcgcgattccagtgggtcgcctcggcgaaggacagctggatgtagtccataaagtccagcattgtccaggctcagcccttgcaggtgacaatatgactagcaccgtgaaaccaaacaagatcgttcgtagcaagcgcaattgaagacccgaccctgagagatcacagctgattgccccattcaggttagcgttggataagcccggcggtgggttaatccggttatcagcgaagaaaaaatgtctgtgggggaaacatctaaccttctgcctgaattcattgaaccaccaattccaaaatcataattcaatatgcctcgttcaaagcgtgcgcgcatcgtccacgagtccaagactgccaagaaagatcacaaggagcagacccggcgcctattcgccaatatccgggaatgtattgaagaatatgatcatctttttgtctttgcggtcgataacatgcggaacacctatttgaaggatgtgcgcactgaatttgccgatagccggtaagaatcattgctccaatcggaatttgcataagatattgaatcggaaaaagcgcttgatcaacagcggtggatccgatatcaaatatttatatgcaaatccttcaaccaaaagatcagttgtctaattatgtctttccagagttttcttcggcaagaccaaggtcatgggcaaggcccttggcgctgatgtcgaaagcgaagccgctcccaacctgcgcaaactcactcctttcctcgccggtgccgttggattgctattcacctcccgcactccggaatcagtgatcgactacttcgagaacttccgtccccaggatttcgctcgcgctggaactgaagccactcgctctttcactattcccaatggcctggtcaccgcacgggccggcgagatccctgctgagcaggacgagcctgtcagccacaccattgagcccgcgctccgcaagctcggtgtccccacccgtttggtgaagggcaaggttatgcttgagttgactgagggtcaggagggctaccccgtatgcaaagagggagaaactctggactcgcgacagactacgttgatgaagatgttcggtatcacctcgtccgagttcaaggttgacctcaaggcctactggacgcggagtactgaggaggtcaagatcctcgagactgagggtggaatggatgttgatgcatagatggggatcttcatatttttccgttttttatttcttctctttcccattcggcttccgtgtggccgaaaaaaagaactctgctgggcatcttttggagtttggtgagggcgctttctttgcaaatatattgaagacttgtgtgttttatctctctttctctcgcatccttatacaggaggctttccctcctgctggattatgagcctatgacaagattcggataccaggtcgaaaaaagtctacaaatttacctcgttcttggacatatatcaaccgtagtgcagaaccgctagctgtattgcctagactttcatctatctagcaagatacctgcctttcagtcgtttcacatggtccttacctggtcttacctgatggttcaccagattccatttttgcgcggaagaggacagaactaaaatacaatacttacccctgcagagaaaacgaaatctcataggaccaaggggaaaaaagggggaaagaaaaaaaaagcattggaaaacgagtcaagaaaacacgaagggaaataagaatagatagaacggggaatacaagcacaattcatgagaatctccgtctgccgaggagtttagatggaccaagcaggggatgtggtgaataaccactttgacatcgagttgtgatgttggtatgaggtggaaaacattgacggttgtgagcgttcgaaatgaattgcacatgggccaattcatgatttacccccttacccttgagaaagagtgatacaactgggtagatcagtgatacccaccagtacaccagcaaacccagacttcatcggaaagaggtaagacccgggggataagtgaagggtttaataccttctcctggaacgaggatcatcgtgtccaggttcatcctcacggtttcgcttgcgtccataatcctcccggccgccgtcacgaccgccgtcacgaccaccatcacggccaccgccgccatacctgtcaccacgttcaccacgttcacggtcccggtcgcggaatcggtctccgtttcggtctccagtgcctcgatctcccatgcggtcacgatcacgatctctgtaacggtcgtcacggtcatagtcgcggcggtcacggtcagcgtagctatctcgaggccgcacaggctccgaattgctgccagttgcaccacggtcgaatctgccaccggcgccaccaccgcggtcaccacgatcaccaccgaagctaccacctctgaaacctccgctacgtccaccgccagggccggagggcgcgttagggggagcctgtccaccgaagccgccacggttgccctggtatccgataccaccgcgaggaccaccgaagcgatcattgccaccgcggaaacctccaccacggaaaccaccacctccacctctgcccccgaagcctccgcggaatccgcctccatacccacccggtccagatggtgcgttgaaaccaggtccaccacgggggagttgcgcaaccttggtgtatccgcgccctccgagaccgccaccaaggcgacggggcttccaccccttggtggtgcggccacgctcgacatctaccacaactggtcgtcccttgatactgaagttctctgtgtctttgtaggccgctgatattgatgaaggaactggggtcagcaacatttcttaccgcaagacgaattaaacgggtgggttggatgccaagtaaattgccatggttgtgatacctttcatatccttctcgcgctcgaacacgacaaatgcatagcctctgtggggtttctttttcttgtctgatactgtatctttgatgatggtaatctggaatcacaaagttagagctgtttatattcacaagggataaggaaaacaagacatactctttcaatgggaccaaatcggccaaactctcgttccaggtcagcttctttggcttcataactgaggcgtgagacaaagatagtcctgaatgggtcgcctcgagcttgaggatctttatccggattgtctgtaagacatagccacgttagcctcttgaaataatgtgaaatgtgaaaagaggataaagcgtacagttttgcagtccatccgctatctgcttctctaactgctctttcttctcgactttctcgcgcaatttgcgctgcaccccgctttcagttgcgttgtagggaacttcatcggcaaaagttttagcatcggcaaggaactgggcaaccccagagatagtgctcttctggcagtcatctggtgcgcgatcgcctggaggcagatatcgaaggggtggacgcggctggaacagcgccagaagtggcgggggtagcttatccgtcatactgagtgtgaaaccaatgcagataaagtggggatgtgaagtaaagacgatatgtggaagatgagtgaaacctcaggagtcagagcttcgtgtcgcagttgtggtcttagcgggtcgaatgatcaaagtgctgcacacgccattggtagcgtgactcaccgcccttaccaatcacgtgcaccagaaaatgccccgagagccatcgcgacttgtaaactccggctataactattgacgactggaaagatgccgttgcgcggaattagaacatctacggcggccagggtatgtgaagtccgaatgtttgatattcaattgacgaactgacccaaatctgcttagaacggcgccggtgccttcatcctacaatgcaaacgccttgacttccattactgcaactgggcgggcagctcaaagggcatggtgtaggtgtatcctaaatggtgaaactgaaactttccagaaacatccgtactaacattgaacatcgcagtactttcttagagaaacacctccccgctttcgcccgcgagaaccctcagattgaaatccgtgtctctccccgaccccagaagcaccccctgattaagggcctttatatcaatggccgtgagaagcccgtgtgtgtacggaacttggaacctcacgaaatcctgaagaaggcaattctcctcaaagaagctagtggagagaagttgaagcgggtcaagaagccagtcacaagtttgaatgagagtgtgcgtggtatctggtcaccataccacggtgatcttcggggagtctagacggttgtattttattatttacggttcatgttctctctgcggtggtgactatcaggtatccccactgcaacctactgtactattgacctgggttgtgtttatttcttcgttcttgtctatttgctccctggaagccaatggtgttttgaaacccatattttatgcatacaaaacttgagcctatatcaattctcttccatgatttctctataccggaggtcaccgaaagtttggcttaactccggactccgggatacttctttcatccaaatccgatggtcacatatcttattagcctgatttggatttgaaagcatacatacgtgcctaacaaggctggtgttggctagcttattgcatggttcgcaatctacttgaccgggggctcggcttttgccagtgttcgcccatcccctagttttctacctgcgtaatcctcttccctcactctcatatttcatatttcatctgagcgccttacttgcgaaaaagtgaagatgcagtgtggcatttctgccgacactcactttggaccccgagtgctgccatgccgtcgcgatttcgactttacgttgctcttcgagcagggcattctcgctttggctccgcatcttttattcctcactctgtgcattttcagtggtatcatttccacagagagcccaggaaagtacacgtagtgctgctggcacttggaaagtggtaggtctcccttttccttagctccgaaattaggcttgcaagctaatgtgatattgaaatatcaagcaggtcatttccactctactactagctccgaaacttgttctcctcgtttgtggtgtttaccaaactctccaagaacaaagctctcggttccgtctcaaagaaaggaactaatcgaaatatagtgagcgtactaggatcatcctatatcgcccctcaaatgcgccaaaagcaaaaggcttgggtacatgctgttcaggagagagtcaattttacttcgataatgctgaaagagctgcgccagatcaaaatgttcggtattgaatcagacgtggcattcaagacaaacggtcttcgtgagttggaactccatcaatcaaagccctaccgatcaatgattgtcggtgtcaatgttttgagtgcgttgtcgactgccatcgcccctgccctaacaatagccatgtacgccactacacagctgaacctcaggctagagacacccagtactgatgttgccttcacaaatctgtccttaatttctcttttgacaaacccggtagtactactatctgtctccttgactagattcacatccgctattggctgttttgatcggattcaagaatttttttgcaagaaaaaccgagtacatgggctctcatctgtcgatgaatacttgctgcctgagaacgtgttagggatggaacccgaatcagtgccgactcagtcacaacctcttgtctgcatgactgattgctgctttagcctgggcttagaggctccagcaatactccatggactaactttgaagatccaaaatggtttttttttggctgtgactgccccccttggctctggcaagtcatctttactcaaagatatgctgggtgaaatgcattctacggaaggaatattgactgttcgttcggtcaaacaggcgtattgccagcaagctccatggatattcaatggcacactaagaactaacactatcggagaatcaccactcgacgaaacgtggttcaaagaggtggtatatgtctgcaacctggattttgaaaccacaactctttctcttggacttgacacactgactgggagctcgggagctgaacttagtggagggcagaagcaacgagtggtaagtatatcggtaatctcattccatcttaggtactaatttgcgtgagttcaggctttggctagagcaatttatgcaagatcatctttgctgattttagacgacatatttggcgccttggacacagtgacatcaaggctaattttccagcgactcctcgatcgtgctggcttggtcaggaggctgggtatcgcaaccattcttgtgacaacagctggttagtctaacttgaacccttcaaatgcttacggcgctgaccattgcctttatttcactagtggaacacctcaaagaagccgataatttgattgttctttcaaaggacggtcgcatggaatgtcaaggacttttcgaagaactggcgaagaagaatcagtacatacagagtcttttgtgttccccaagtccggaagacagtgaagtcgaagaagagagcaaggacagtaactcccaggtgggggaaatacgagaagagaagaaagaaaccagacaaacaactcaaacaaagaccgtttccaaaatctccagggtgatggggacacctcactctacacgtttggttggtgggcatgtgggctaacgctggcattcacaattctatacgtgttttgtattgcatttccgcgtgagtatacccatcactggatatattcagagacattgttcctaaatcatatcgcagaggtcatgcttagctggtggtgtgactcagctcctccaaaaaaattatatttatcttggttcctacgtcggcatttcttccatcgccatagttgcgatgggggtttttatcgggtatgttctcagcactgcgacgctatatatgtatggagacatctcatatatcttaggttcttttttgtctggactgttcccagatcggctgttaagctgcatgaggtcttcttgggtacaataatgaggtcaggaatggggacagactccttttatattagactgaatatgttgctgacgagcttttcagatcgccttggccgagcctggctcgcatatatacaggaagtttgataaatagataagccatataattgagactcaacgttgtgatttcatcgaaattaacctgaaaaattctaaacatctccagatttagccaagacatgtctcttctcgacatgcagcttcctgttgcttttggcataactccccagagagcgaatcttcgttccccagcattcacaaattgttaaatactgactttctatcgagtaggctttttgacctgtattgcacaaggggacttgatcgctactggatcaggcttcatgtctgtcataatacccttctgcatcgttgcggtatggataattcaggctttctacttgcgtacttcacgacagatcagacttctcgatctagaagcaaaggctcctctgtatgcccacttcatagaaacgacagagggtctaactactgtgcgtgcactttgttggcagcgtcaatttgcagatcggaacaccgagctcctcgatacgtcccagaaaccattttacaccatgtattccattcagcagtggttgcaggttgttttggatctacttgttgcgggccttgccaccgttcttgtttccctagctgtttttgtgacaaagcaaagtagctctggggccgtcgttgtgaacttatttcattcaactcaactttgacattgttgattactaattggacacagcttgagacttctctaggcgcaattgcaagggtcaagcaatttgtgactgacccacagctacaacctattgccagaagagagatggcttatctcaagcgctggccttcggaaggtcgaatggaatttcgaagggtttctgcttcatatgggtaagtgtctctttcagcatcactctgttacgcaaatagaaatgaaccaaaggactaagattgctattagggggcatgattccgttccagctgtgcgggatatctcatttacactggaaggtaaggatggataagctttatgaatgaggcataagtgataagttgaatagtgggaagagttctttacttgcttgcattttctctctcgcgacgatcacgtccggcgaaatctacattgacggcattgacatctcaaccgttcccaaggaaaagcttcattctgcattggtcccaatatcccaaaatcccaaaatcccctgattcttcccggttctgttcgccaaaatatttccttgggaatatcatcaacgattgatgactcggagatgatttctgtcctggagggagtctaaatttggaatcagattcgtgacaatggtggcctgagtgcgagcattgattcaactcatctgtcaaatggacaaaaacagatcttctgcattgcccgtgctattttatcacctggtagaattatcatcatgaatgagcctacgggcgggcttgatgagcacaccgagagattagccacagagcttcttcgtgaacggctgataggacgcactatcatttcaattgctcatcaaatcaatactgtgatggactcggacttggtgatggtaatagatcaaggtacagtatctgaaatgggagaaccgcaagaacttttgagtaggaaaggcatgttttggcagttgttccggggcataaaaggtgtctaaattgaagtcagccagcgagaatccgttcaaatagtcttctaagaaccacaaggagctccaccgcaggttccacaacgggccgtcccgcacaattatgtccacaccgaatcaagaaccgttggatatttttcgggctcactagacagatttctctaatccacattgacccaaatcaatcgcatcatactatacttgtgatttaggttgattggttttgatagcagctacaggattggtaggaatgtgtctctgccatgtggccctagcatcatatatatcttagcaaatcttcaatgccaccgtcttagtctgagttaaacgtggcataagaaatctgtataagcattcttttgtaggaagctctttattaggcttcaatcatgcacaggggctgtctcacctagtacggcaatgagttagcggcattaacggtcacttgcattacccactacttcacctatagtcacagtaaaaacaaaagaaaagtaaccatgcaagctcgctattacccgtagagctgacactattgagtctaggcgctaggttaaactcttgggcgaatcggctagggatacttgcacaatgtaataaaatatacgaagagggacggagagtacctgcacgtgctaaatagaggagattagttgaccattccctcccttttctttctttactttttggctatcgtgttcaagtcgtgcctagcagttctaaataaaacattaaatcaaatctcaatattgtttgcactcttatctctctctctcttgtggaagtccacaagtcagagtctatgaatatccttgccaccccacgacaggatgaacagaaaagggagatactctggtcggattggtggaaactgagggggcgggatttcgcccgagtcaacacccttgacatattcaacccctgaattatttgtcccgcacatcagttgttctcacttttactactccgtatgttgtacctatcttgatctgagagctcgccgaagcctattccaccatgtctcatatcataaactccttccagcaactagaaaaggttcgtaccttcttttgattccctgcatgggtttatgtcgttatatggtggctgtgaaatttaagaaggtaccttaaaaaggataggttgagttgaccccgctgattttggtcacagttgggtgaaggcacctatgcaacggttggtatccccgagaagagtttcagtctttctgcaagaataccattcatgataagactaggtctacaaaggtcggaacaaccagaccaatgagctggtggccctgaaagagattcatctcgatgccgatgaagggacgccgtcgactgcgatccgtgagatctccctgatgaaggagcttcaccatgagaatatcctggccctgtatgacgtggttcatactggcgaaaatctcgtgatagtgtcggaatacatggacaaggacctgaagcgctttatggacgaccgcggtggcgctcttgatctccccaccctcaagttcttcgcataccaaatgctgcgaggcatagcctactgtcacgagaatagcatcttgcaccgggatcttaagcctcaaaatctgcttattagccgggatggagatctgaagttggcagattttggtctcgcccgtgcctttaatatccccatcaacactttctcaaatgaggtggtcaccctctggtacagacctccggatgtgctcttgggaagccgctcttacgacaccagcctcgatctttggtcagcgggttgcatcatcgccgagatgtataccggtcggccgttgttttcgggaaacgcgaacaatgatcagctgctcaaaatctttcaagtgatgggcaccccgtctgaacgcacttggccgggtatcagccagttgccagaattcaagcccaattttcctatctacctgagtcaagacctgcgactcctgatccccaggatggatcctctcggggctgatctgctcgagcgcatgctgcaattgcaacctgagctacggatcagcgccgctgatgcgctacgccattcatggtttgacaatcttgtttctgagacagggctatcaacacgcaacgttcctatgattgtttagatttccaatgctgctaggtacaggagaacatggtgaacccataataaagagtgagggcattacgacgtcaggaccatcatcaaggacagggggaaaccaggcttgccctgagtgtatctacaattgaacactcgagacatgaaacgcaatcttcatacaactgaaggctgatattgatacttctcatccaatatcttcccaaagaattgtacactcttgccagccaacataatatacttcatatatctagttcctagatcataatgtcgagggccacggtgcctggctgatattctgaaggtattaattagtctcacggtcgatcttggatacttagcaagagtaatcatgtttaccaggcagcctgagaactagaatacattgcaatctaccatgagtttcagtacaacatccattggacaatatttataatattctgcatatgataggctacgaaaccaccggggtcataacgccatcataagtcactgaatcgtaatttggatataaatcattatttaaaaacgcctgccagttcaaatgcatcttgggtatcgacggaatgaggaaaggagatggccataacaacagaatgcaaatgaatgcccgcaaaatcaatgcccagggtaaatcacagataaaggtggtacatagccgtcgggctacttacaggtttattacaacctgcaacttggcaccttgagaacggctttgtctttgaagctgcctttttagactttgagatggaccgattcccagcgcattcgccacaatatacctgacaaaattgttagtctttgtcacggactcatcagctcaaaatggacaatactcacatggccacatggttttgcaatatgaatctgttgttttagcccctctccggttcccaactcgtcctggcagttcggacagataggcacgtcatcttctgccaaaaggcgagtgaatccttcgggtgctggacttagtcctttatatgatgatcgaggctggggcgccggctgaataggcggataaagaaccgcagagtgaagcaaccccaagtcactcatgccattggcacgatagccggaccatgtcccatcggatcttctcggccggcgtgtatgaggagggaagtgcattggtattggaatgccattggtgtcgaagtacctgggttctattggtctcggcctgagggtagaagacccaacaaactgaacatctccactgcccggcgagacctccgcttccagatcgattacagcaggacgatcagccatggtggacgtgtggttcatcaaatctcccggaaatcgtaatggacggggggatgtgaagggaccgaatattgatgtcacattccgatggggaggagagtctgggtcgtttgtcaagtcgatcacggcattatctccaggtgaaagcatcaccggccgtcggtagtcgaatccatctctatctcttctgggtggcaaccgggaatcagatcgagcgtggtcggagcgacgtgggtgaaagtgctgttcccaagcggcatcaccgcttccatcatcttctgtggccatctcacgatgtcttcgctgagagagaaagaaatcttgttagctaggttcttaatgatctgatcgggtgccccgcccgtttcacgacggatgaaggcttaccttggttctggcgcccataaactggacgccagagttttcactcatttcagggcctattcctgaagtcaaggaatggtattttgcagagaaaggagaaattgaaagccaccagggaggtgagagagcaagattggaatccatctttgtgtctaggccgagtcgcaaggcggtgaacttgtgccaatgttataaggcggtgtcttgattagtgagctttgaggttgagggccgggaacgcattccagaattgacaagacgaactggctctagcaacagatatttaactcatttctgtagggctttgttgctgtctactattagtattccacaccaagtttcatataaagattggaccaaatgaaaggtatgaattcacgatgaaatctttcattcatctctaaatttacctgtgaaccttggaatatcatctgtgaataccatctgtgaatatcatcgcaccaagagctttcaaatcaaacaccatggaaaattcagaaggtcgcatgctctaatattacagtattttcctggtgatcatgactgtgcctctagcactgtgatcacacccgcctcattcaacgtcacaatactctgagcagctgatccccaagcaaccgaggtagcagggaccgcactccgcagaggctctgaccaccccttggaggcctttgagtattgctggacagttactccgctgggcccaccagtcaagaggaattggccagtataatcccagaagattgagtctatctggcttcctgtgtccagtaccttggtctccttggagctgcggagatcccagattgatacagtggtggactgcgcggctaccgcagccaggtaagtaccgttctcagagaagaacagacatttcactgggcccgacatcgtatagtccgcagcagcggcgccggtcttgacatcgaagatcttgacttttccgtctgcgccaccggccgcgatcaagtgaccatctgggtggaagttgacagacagtagagctgaacaaaagtgattagcatcgcgcttggatatatgagttccataggttgacttcttacctgcatcgcagaaaatttgggagaccacggtgttggtggcgagatcataaagcacataactcttatcgacaccaacagaagcagcaatatcaccagtagcgtggactgtgacagccgtcacctcaccagagtgggaggcgaagcttgcaacttcagcgccattctcaaagaccttgacggagcccgtagaggaggcaacgacggccttgtttcctgcccatgtcgcatcggtgactgggccatctgtcttgagggtctgtacgacactcttctgggagagcgagtagacaccagccacgccgtcaacaccaccaacaagagccaggtcaccagtcgggttgatagataacgcgcggccaccggggtagagaggttccgagacctgagatggcttaaatgtggaaatagcctcacttgaggcccagccctcggggactgcgcgcttacgtcgggtctttgatagtctgtccaataattagtcgtctatccagaaatgcgatggagaagcaccgaattcacgtacgctgcctgtgtgttctcaattcgctccaacactgcttggggcaggcccgtggagtccacttgcatagcctctcctccggcgcgagtggtaccaacagaaacgttcgaaagtgcctcgcgggcctcgtccctctcctgcgtcaggcgcgcaatcacccgcaccgcggcatcatgctgatagagtgccgaacttagctcgcgccttgtctgtgccaaattctgctgcaaagtgaaggtctccagggccaaggcatcccactcttcttgaaaaacgctgagcagagacgggatggatgtaagagtagggggtcgaggtcggacaacgcgttgcgacttgagatcgatcaaatcgtcggtggtaagctcctcgccgttcacgggatctttgccatgctcggcaatgtatgcttcaataaggcgcttttcaaatacgctgcctatttaattatgagattgatgtcgtgcgcgcaaggtgatttcgaagacttaccgctcttggtagagacgacgggcacttgaggtgcttctccggagactgtgagaaaggtttagtgaggaactcgcttgaaagaagagcacaaaattgcgattcatagtaggctactcactagcacaaagcatagttaattggtattggttgatgagggttgatggacaggacttgacgcgaaacggctccttggacttttcgatgtgtcctattatggtttagcgtcttgagctgagggcggtgtagtagggcggaatattgcgaccagcagtgacgtaagtccggcgaattttgaccggcagaaaagtacagtccttcccgtgataggtacggcgtagaggggccagagaaataggcggtgaggcttaggaatgtatggtcgcggtagcccgccgtagaccagcagctatcgactttcacaattctccaattctcgcttttgcatatagagataacttatctttctatttcgattgaacaaaatggatttccctcgatgatctacagaataggcaaagggcacgagtacaaagcttcacttgaaagctagcaagcgaatacagcgagcgcattcccatcatgcctaagaacccaaagtttgaatatggtatgtcgctttgcacctctctaacatacctatttgattctaacctgttatgcagatgcaaagcagcctgcatttctgcagaagctccggggccagtatggagacggcactggtcgcttggagcggccagccttacgaccgaccagactcaaggtcaataatgacgacgacgatgacgagcctacctacctcgacgaagaaagtaacgaagtgatttccaaggaggaatacaaggcattggttggtgaaagtggtccgaaaggagaggacgaggccggcgaatcagcgaaggacaaatccactggcgatcaagacaaatcccaaacagaagtttctaccaacaaacagaacaatctcactgaggttggaggtcagaggaaacggaaaaaggccaaagtggtgggtgaggacaatgccgaggccgaagaagtccttcccaaggcaacttcgaagaaatccaagaaacccaagaagatcaagctctcgttcgacgaggaatgagagtccagcaaggctgagaactagagtattcctttgcgccacgtcgtgggtggttgactcagtgtaaagcatcgaggactcataatgagtcaatagaacggattacacaacggggattgtataccgtcataggattagagactgtcaaagtcaaagtcatatagaagaatacatactaatgccagtattcagtctataagataaaaatccatccagttcaaaataataattcaagtgctataaaaggtctgggccaagggcgcatctttatccgcaactttttttgcaacttttttttctctctcacgggatccagtcgccttccattctttttacaaacaacctgctcttggtctcagtatcagtcaagatgcctgttgtaaatgtcgaccagctggtccgcctacagcggaagcccgaggacataagaaatgtgcgtgtgcccctccatcccactcatatcagggctttatactaatctcagccaccagatctgcattttggcccacgttgtaagtcaaagaaatttacactttcgttccaaatgagcctaaaatgctcatcgcgctttcttttgcatttttaggatcatggcaagacatctttgacggatagtcttattgccacaaatggcatcatttcacccaagctggccggtaaaatccgctacctagactctcgcccagatgagcagcttcgaggtattacaatggagtcatcagctatctcactgttcttctcgatgctccgccgtccaagcccggacgcagagccagtgaccaaagagtatctgatcaatctgatcgattcacctggtcatatcgatttcagcagcgaggtctccaccgcatctcgtctttgtgacggtgcagttgtgctcgttgacgcagttgaaggtgtttgcagtcaaaccgtgacagttttgcgacagacctgggttgagcagttaaaaccgatcttagtcattaacaagatggaccgcttggtaacagagctgaagatgagcccggccgaggctttctcgcatcttagtcgactgttggaacaggttaatgctgtcatcggtagtttctaccagggcgagcgcatggaagaagatctgcagtggcgtgagcgtatggaagatcgtgtcaatgctgcagcggctcgggaccaagacaacaaaaagacatcagctgacgatgagtctgcacaaagcatcactgagggaactgaatttgaggagcgcgacgacgaggatctttatttcgcacctgagaaaaataacgtcatcttctgcagtgccgttgatggctgggctttcacaatccggcaattcgccgccatttacgagaagaaactcggaatcaaacgaacagttctggagaaagtcctttggggtgattattatttagaccctaaaactaaacgcgtcttgggtgtgaagcatctgagaggacgtgctttaaagcctatgttcgttcaattggtcttggatagcatttgggccgcttatcaagccaccacaggtggtgacaagggcaaagggtaagttgaaaacgaacccaactatcgcgtcaacgctgatatgatattgacctttactagtgacccagtgttgctggagaagattaccaaatcgctcaacattaacatcccggtatatgtcttgcgcggacgcgaccctaggaacattatgaatacactattctctcagtggctgccactatctactgccttgctggtttccgtcattgaatatctccccagtccgcccgttgcgcaagctgcccgactacctgaaatgatcaaaaagtcccctggcgctgctttcattgccgacgatatcaagaccgccatggtggaattcaagacaggacctgaacagcccgtcgtggcatacgtcagcaagatggttgccatcccggagagcgagcttctgtctaatagaaagcgtagcgaaggcgccatgactgcagacgaagctcggcaaattgcgcgtcgcaagcgggaggagattgcaaagatgcaggcggaagcccgcagtaatggagaagcagatgactttgatcgtatgacatcgatttttgaaaccacctcattgatcactgagacgactgaggagccagaagagccagtggataaggaggaccctgatcatcttattggtttcgcccgacttttctccggaacgctttcggttggagatgagatctatgtcctcccgcccaagttctctccagccaatccgcacgccagcccggagccaaagaaagtcatagtcacagacctgtacctgatgatgggcagagccctcgagcccctcaaatccgtaccagccggtgtggtattcggaattggaggtcttgcaggccatgtgttgaagacaggcaccctctgcagccgacttgatggaggtatcaacttggccggtgtttcgctgagcatgccgcccattgtccgagtcgcgctagaaccggtcaacccagcagatctaagcaaactagtcaccggcttgcgcttgcttgaacagagtgatccatgtgcgcagtacgaagtgctgccgagtggtgaacacgttatcctcacagcaggtgaactgcacttggagcgttgtgtgacggatctgcgcgagcgtttcgcccgttgcgagatccagactggtgaggccatcgtcccctaccgtgaaactattgttcacggccccgagatggctgcacccaagaaccccgacctaggacgtggagccgttgtgacggtctctgcttcgaagcaaatgacccttcgtctgcgcgtggttccgatgccagatgctgtcacggaattcctgactaaacaggtcggaactatcaagcaactccaattggagaagcgctcagaagctgaaggcaagatagagaccgagaacgcagccgaagctgccgttgacggtactggcgaggcgcctgaaggcaacattctctccaagcaggagttccgcgaaggtctagagaagttgttcaacgacgaggtcaaggaagacaaggagctatggaagaacgtcgtcgaccgaattaccgctttcgggccccgcagagtcgggcccaacattctagttgatgcaactgcagtcaacacatgcgaaaaattgtgagtataggttaaaagaaacactatatctatcatttagatctaacatctccttcctagcttggtcgatgacaccaagcaacagatcgacggtgataaccaccaggcactggtcgtgcgcgatttcaacgacaagatcgcgtatgccttccagctcgcaacaggccaaggtcccttgtgccaggagcctatgcaaggcgtggccgtgttcttggaagacttatctgtgcagtctagcgcaggtgacgagcttgacatgggccggttgacaggcgagtcaatcagactggtacgtgaaggtatctcggccggtttcctggactggagtcctcgtatcatgctcgcaatgtacagttgcgagatccaagcgaccagtgagtatttcattcttcccttctgttcatgccttcacaccacacgcgccacacgcgaaaagcaaacccacagctaacacatcatcttcacccttaaagccgaagtcctaggccgcgtctacgccgtaatcacgcgccgccgaggccgcattctctccgaaataatgaaagaaggcacgccattcttcacgatcctggcgcttctacccgtagccgagtcgttcgggttcgccgaggagatccgaaagaggacgtccggtgctgcgcaaccgcaactgatcttcgcaggcttcgaggctctcgacgaggatcctttctgggttcctgctacagaggaagaacttgaagatctgggtgagcttgcggataaacagaacgttgctaagcggtatatggatgctgtgcgcaatcgcaagggtttggttgttcagggacgcaagttgattgatgcagagaagcagaagactctgaagaaataaggccggggtactatttactctggtagagtccaaaatggaagatttatttgcatttcatttggggcttttttgtaggatggacatggatgatatatggattggggatgttactccgaaaacatctgtcgagtcgcactgagtagacttggacacgacagatgaaaaattggaggttcacagaagatgagagtcctccgcgtgttcttcaaagaaaaacatcaatctccctcacttgacaaacacagtccgacatggcataggtctcgaccgtgtatactaaggagggttacccaatagggtctacgagtagtggcgttgacgcctctctacttagaaagaagaggaaggagaaaagcgacgacaggatgggagcctgcagtcgagagtcgaaggaaaggaagggcggaaatgacatagatttctcaatcatgtctccgttgggtatctttattctgaaatcgttatcaatgtcaataatacacatatctgtgagtgcacagtggcgtaattggatcgattcaaacggggaaaggggagcttttcccacttcgtgaaacatgaaagtcgtcatgatcaacccgggtgctgctgcttgagagcatggaacaagtgtgggggtttgaaaggcattcctcgcagtgaaggttgggagtgaatttttgctgaaaaccatggatcccggaggtagaaagacaatgctctcaggggatgagcagatctgccacggacatctgggtggacgggagcagattctgcttgattgttgtaagctgaaccactgtgtggccagttgacagtagaggaaagggtcatagccattggacattcaaagagaaagccaaaagccagacaaggaggggaccaagttcgaacaattacatgttcagaacggcctggcgaccttcctctgctcactagttccagtgacaggatctctcatttccttccagctgacagggaacatcatgttgccagcgtcactgcgagccatgacaacaccgagatcattgcgtgcagtagtgatgtagtaaaagctctgatcgccaagcgagataacggagccgcgaacgatatcgccgacacggaacatctcatccataacgacacggtccttctcaacagcccgtacatcctctttccggataagtgcctggaagcgcagttcgtcggtgctgctgtggttttctgggttggcagcagatgtgaggatggaggcgacattgtcattgtctgaggccgttggtgattggccttgagattgtgctgctgattcgtcgaggacgacgaggatagaaactgtagcttgtcgcttctgtacacgggtcactcgtgcaagaacgatggagtctaccgcggggagggtgttatagcgaggtttcgacgcgattgagggtacgacgacgggaccagccggggttgagcctgcttggtctttggaatatatcactcgtgaaactctgagggtcggtcttgtttgtgacttcggctgtgcagggtccgcaatcacaggaccggcgatggaggcgtagatgaaggattgctgaacgtgtgtgccgggacctgcagaatatgtggataaagggccgaggcgttgcccaggaatagcaataggtggtagagaagccatcttgcaaaactggagttgggccaattctgaggtaaaaaaggtctggagtttgcaaaggcagcgagttttctggagcttttttaggagctataatacggcccgggtttaggttattccgataccagcttatccgcatcgactacggagcacagctgtacattcaaacactatgaactacattattcaattacaacttgtcaatgaaattctgtctgcggggaattaattacagagcctatatctagcatgaaatgaataaacaatgtacgcttcggaacaacggcaccggcccagaaataccatggacatataacaacagaagagataaaagtccgtatcactccgaatgcccactgacgaagacgaataagtggctttaatatcatccaactaacggtttttgtacgttgtagggatatagtctggcagattagggaggtctacccatcataggaagcacgtttttgcgcgaaacaatcctaaccgcgaatgggatgatatgaattatgccaaataccaactagtcaagccatctaacatagactagaaggatatcactcgatgggagtggtgaagcaccactcggtggcagggtcaaccaaggaaatgtaacgagccagtgtgatatatgtgatacaagttgaacatctttggtctcatttcctttgcctttgctgattgatcatgcgctcgatttcggtggctgcggggccagatgctttagtgcggaggagttccagggtgttaaggtccttagtcttttgtgcttcttctccggccttcacaatcatgccgcacttcacccacatctcaattctctcagcggggggcaagtggctgcactttggcacgaatcccgaagcaagttttgtgtttccagcacccaaaatctcgttatagaaaggctgtcttgtgtgagcgtatattcagtagttaggattattgactgtcttacctcccatccgattggggatttcttgagtttagcgatttcctccagttcgccccagtcacgcttagccaccaaagctctcagtctcaaccaccagaaagttttttcaggcattttgaattcattttggatcttgtgtgctcttttaccgtaaccacctcggataagtctgtagactgtctcgttgacactaaggccaaggaactcgctgtggtctgccaagtctttatccaatgcgtcttgggctttcaaaagctgggaggcctcagagactagtttttggttaagtaccactgtcggttccttagaatcagacaagaggcgagatgctagctggagtttttcggttcgtcgtgtcagatctgtatctcgtaaagcttctgacaatagtacattagcgccatcaatgggtcgatcgtcttggtagaacaggtctttcagtagctcgatgtcacctcctcgtgcagcagtttcaacaagtgcggaagccattgggcgggtgttgatcattcggaagaagcttgctaaaggaagcttgctcttcagatgcagaagcacgtagttcaccaagtcatcatcaccactctcaattgccttgtcaagagcaagctcatcttcctccatattcaaaagcagaggtacttgcttgccggcccgtggctcatgattgagcaattgggtagccaggtgagatcgaccctcgtcataagcagcttgagcgataacctcaaacgagattcctggcttcccatcgagtctttggacaataagcttgcatacagcttcgtcatcaacggtcgacaccttcaccttttggcttgcccagtggacatagattttgtctgcgggaatctgtaggtattccgaaatccttattgcaagcagatattcatgtcggctgattaagcgttcgatgagtccttcgggtgtgaggcgcaggtattgttcgtatgataatggtagcccgatcttatagtctcttgatgctttgagaacgcgtagcttttcagtcatctcaacaaactcatcactgttgtacagctcgaggacggatttgccaaacgaggcagctttcagcaggcgcttctgccagtaggcgtcgaattcatggcctgctgctttaatgcaagtgtcaactgctgatggtaaactcgaccggatgcgctgaatgttctcatcagccttgggcgattttttctccagttgctctacagaatccagtagtacggaagcgggagaagacgacccaagacggaatatttcttcggtaacagctggaaattgtcaatgacagtctgcctgtctccttttgatgtcaacttacctgcgaccttatgcacgaattcgcatgtgtcattagttatgagccgaaccccatcaaactctggtatgacatgaacgcggccatcgtagtagtatctaaaatgattagaggcgttcgtatatattacacaaaagagaccacttactttgatgcgactccgttgggcccaacaagatgaatttcatcttcccatccaaggatgacagcatcctcgccacaccaattcacggtatttggaggaacccgagattttgaatcgtactcgctgaacttgttctggaagtcattgctgactacccataacctcccttctgcggtgaaaagtgcgacaaagcgccctgtgggggacacactaatgtgtttgaatggaccatcttgcagaatcttgtcttctgcttccgttgagtcgattaaaaatacggtcttgtcgacagccaacagaacctcaacggatcgtgagagtgtatgggctggtggaattaaagcccatgatgatacctcgccttcaggacaaggtgccaagagtcgcgggcgcggctcatcatatttagacacggcaattagctggttattggacagcaatgcaacaaggcctgatgaccaaaactggcaggctctcacgccatactcttcggcgccctattgaattgttagtttgtgcacagtatagctagggtaggcagtcctaagtctaacatttccgagagaaaaggatgtaaactcgccgtccaatccgaagtagcgtcgcactgttccgtcctcagagacgaccaggagctcttccttgtcagaccagcctagtccgcgaatagttgcttgttcccactgacacaatttagtatattcatcatacatcaatcataaagtgcaaacaaacgtttatacgattgattttccgcccagagcatgaataaatatcaatggtggaacgggagccctgtccatcgcgaagtctgaatgtcttactttcgtcgcgatagagcgctgattttcacgttagtctagatcttcggttctctaatagagacttaccaatagctcctccgtagggggcgcccacgacaatgtagttctctaactcgatgtcgtcctcgaagatggcgtcatacacggcgattttgcgataaaagctgtctccaactttttcccagtttgcgagtggattgggtggcatgactgtagatctgatcacagatgaggcagtgaatcctctctacctgggttgttggatgttccagctgttgatccggagaatgggtcgcgcacgctaggcccgatcgggtggtgttgtggccttgattatcaggcggagattccccaccacagtcctcaacttctcttgatacttgctccatcttcattggccaacttggtcctcttcttaacatatggattatacagatcttgctgatattgctgatattgctcaacaactatctgaccttgaagtggcccttttactatgccttgttgcccgcgaacattgcttgatcgagaccaccagccactgtattaatgaccttgccaaagaactcgccttagtatgtctatgcacccgggatattgggatggtatctgatgaaagacagattggctcaactacattcaattactcatactgcatccttgactgttcaactgcaacatctattgacgacgtctttaatgacgttctcaccccggatgcacgcgcaaactatcgcccatcgcgtcagtggttgaacaccgaatcagtatgttgatattttgaatgctttttgctatggatatcgttgtatagactaatcaaattagtcaagcaaacgttcttcctataagagccttggggattacagcaaattaactccattttcacaactcggcagtaacgttgtcaatattgtagtcgccaaaaacttcaattttgtcagcgatgatatccaaatgcacatgctgcaggtatctattctgactagcagctcaatggagccgatgctgatatttgcgatagttaatgcgatcgaaggagttggtcaccgagaacgggaccctgagtgcgcctgaggacttcctcttcattcctcttgtggcacgagatttcgatcagctccggccatctttgaaactacatctggtaagtattatttgtgcgtgtccgcattttgactgctttactttagctaatgccgcagtagaatgacaatctcttcatttctcatttccacagcccggatgttggatatacctatcttgaagagaatgactggctttcagatggacaaatgtcggcttcctctgtcattcataattcaaaaggcaagcaaacgaagagcgctacagtcagtccgttggtaagtttgatgatttagaatacgaactgaacatagaaatcgaatactgggctcatgaacttacaggtggtgggtcaacttcgagaaacaagtgcgtcggtgagcacgagcgcggaagtcgttcgatacatccaggatatcgttgtatttctgcggctcagtcgcgctgttgcaggtggtgtgtctgcgaatgcaaatattcatttttctcgatttgcacagtgagttcgaatgtttccaccaccacctattacatctagcttatcttactggttctcctctgcagacttctagctcctctgcatggtatcgattatttgactccctccatcgtggccctagccgccaggaaagtctttcgccatcgcattattgtcactcctcctggcgaagaccgcagtctacagtatgggagtaatttacgtgcggtagctgatattctcgttgatgtgacaccggattcgatactagatggagttctggcgctggagccgcctttatgagattataatgcacctgcttagccattctagattactgcattagatacccaatcaatatagattcccaacttgtgtgcctctaatcatttgctttcgggcgagtcacatcctactttttcaatttcagtatctgtgcctacagtggaaccagcaagactcaagtcagcttggcgaccatggttttatttggtccataaagaagacagcttggaccctctagttcacagataaatcgatgcttctaatgctaatttaatgctatacatgtaataatcgcgccagcaatacaccgctagatattctatattcaaactctcacctaccagtactcggcttcaacttcaagaacaagtctgggggtgtatacttcgcgtccgtccttccgtttccagattcagttcgaccgggcgttaaacatagatcaccatgaactgcaccaacgggctgttctctgaatgcctccatggccttcgaatgcctgcgccactcagacaaaacaacatcgatttcagtcttggagtcaccgacaatagcatccatcttgatgtcatttctgtcgtagccaaaggggtcttccaactgcgagcctattccttcaattccatacaatgtgaagataacaaggctaacaattgggatggcccaccatcccatctcatcgaccatagcgaacggtaaaacacagccaaacagggcgaggacttgcttttggtgaatcctaatttgagtcagtatttgaaatataaaacttaactcgacacgcattagtcatgaatcttacaggtgagccactgggatcggagtcaacttgatcgtttccatcttcccgtatgcatcagtcaaggtattcaactgagcctgcatctgactagcgccaggagcaggataccacccacgttcttcgccgcgcttgataaacccatcaatgaaaaaggtcaactggaatggaaggcctaatccctcagattcatgaccctcaagacccgcgggtaacaagttggcatattcggggttataaagggtagatggatgtatgcccaggtcctcatcgacggagttaccaaaaacccaagcagcgccccattcggcgcgtagatggtttttcacggcgtacgggatagccatgagaatgcggatagtacgctcgatatcctcgcgctctgcggcggtgggcggtccccgctttgaattgtagctatttgttgcgatcgtgcggacgagattgcgcacgcatgtattaagtgtgttcattccgttccgtccgtcccagaatcgattgtaggatgtttggttgcggaagacaagcatcagacctacgacaatagataaagatgggatctgtttttgatatgtttagttgctgtctcgtcttattggttgggggtacatacgatagtgctaggtagaccaacagtgtcgaatacgaaggtatccaagtaaacaatcaaggctgtgaacaaagcatgcagaaggaccgggactagtatggcgccatgaattgcacctttgataaagcgaaaaacaagtggccatctgctcgatattagctcatgcggataattggcatataccgattagatagctcaccttcttggctttgtccgtgatgacagctgatggggatgagtgccacgccgttcatgatgaccttgtattgtagtgttttggcggctcaaggtcggagtgggcggctcgctgaaatttaacctcatgtttagatttcgaccgatacagatcaatttgttgaggctgactcctatccttaaatcccgggggatggtggaattcggctttggtatccaaccaagccctgaaatccgggggatattgaacttgggactaggatggccgtcaacattccaaggttgaaagcgggccgaacccacttgccatttctagcgccgtcaatcacgtgacggcatatatagttccatacaacactagtatgtagttggctatgttcattgtagaaatcctaatttattcaacctctcttgtgacaaggcaaatacaattgtcgggaaagagtccatttgactgaagtggaaagaaattattatgaattaatgtagatgtagaacgatggaggactggtgaacaaaccaataccagaagctaacaggactcagacaaaaagataacatgaaacaaaacacctctccaagtatgtatcctgctatatgttacatgatcacgacaaatgggttgctaactaagtgcacaaaaccgggaagcgaaatgactgtacaggaagtggcccttctggtcgacaattagctgttgactgagagagaggacgagagattgaccaggtggcaaagatccgacctgccgtgggcagtgagggtgcctcagcaaaaggtcaactgagaaatgaaggaggaccttgattcaaagatgccaagtagactcaaccgagaacaaaaacccaaaggatagaccaatggaaattgcagaaacaacacattgcgaatgatggacgtgctgatcccttaagtagagatgtagcagcaaaggccctcaagtaacgtatactttttggtgtggtatggttccagtatacaagatagtgtgccggatgcgtggtcatcgatctagggcacccgtggactttcagctgcgggcgacatggaattgtcgtattgatcacaccatcatggtgctaggttgctggctgccatggcctgtcagcaaccagatgagattgtcccccttgttatagaccaaggtcgggaagtaaagaagggcccagaagattaaggttatgacggtcgaaacgaaggcattgacgacgagtttctcattggatgtcaacacataaaggccgaaggtcacttcgtagcggtagtacgcgagttgcacgcgatcagaagctcgttgaaaaatgttgcatcgtggtttgcgccaaggcgcgcttgatttcatgttggaggaatatttatcgaggcattcattcatggccgctgggacttgcgacattagagaggtcatggggtcggaaagggactcattttgggtcgtcatcatggccatcgtaacgttttcgccaatcgtacacaagtgatagacatcaacgttggcggtagtttggctccagaagtaggcgaaagtcgagggtgggtgtgaaagagtcgcaagagaaccacgtaggaacgctgaaaggtaaaaagtcacaattggggccggcggggtggaaatataggaagggaagggaggtcacgatccaagggggctggctacaacgggaaaaggcggaaacggagtcggcaccaggcggaaagcaaagagtagagtcattagaatatacaacatggatatattggacatagatacattgtggcaaaaactatctattctagactatcctagctagcttagctcaacttggttcctcaagagccggtacctggatcggctgtatgtggaagtatacactctcgggaacttccaaggaatactcgaggaaaagccaattagggttttccactgcgtgttttttgtgtccaaagaacggtaatcattgaatcggaagaatccggacgaacccggtgcccggtgatgaagtctagatgtgctttaaggaaagctgaagtcaagtcacttcgtacagagtaccaaaagaaaacctgtttctccagtatagaccttcaacatggcggatgtcccggatacggacggccggatgtggaaggtggtcctcgaaaagcggtatcctgtggagctggcaaacattcttcacctcacgacggagtatgtatcctcgtcaaatggatatcctgtgggttcgagaccatcagagagcacgtttttaattggttgactatttggctactggcatttaattcgacaagcagaaaactagaaaatttttatagtttcacagggctagccctgcccgagtgtaaggctacttactgatccttacgtcaagccctgtcagaattcttgctgatctatgaaagtagtaagaaagccaagaagggctaagagtggcaaaattaggaggcgccaacctataaagcctaacccaacctactagtcagttttaggtccagagtctaaactccctaatcattggtctgtcaaacctactaaatcgcaaaatatatggtatgacaactatgtatatgatttaattctaggtattcatacaaaatatagggtataaatcatgaaccaatgaaagtgcagctgtatgagggcgaatctgacgtcttcacctgatatataaccttggaaccccgagttctgacagacaaaccctttcaaatttcaaatcaaacatacagttggtatcgtaatgcaaatcctagtaatcacctgcccaagcggcaaacaatgctctcatctcatccctctcttatacaatgaatccaaattcaaactccgtctagcagcccacacccccgaatccgcctcccgtctccaaaccacctaccccgaagccgaagtacaaatctgcgacaccacctgcctggccgaatgccgcaagcttctcagcaatgcaacctcggtctaccacgtgggcccatcgctccactcccgggaaatggaaatcgggatcaacatgatcgacgccgctgtcgccgagagtcaaaagcccgacactagcttcaagcactttgtctattccagcgtgctcggcacccagcaccgaaacctcatccaacacgaccacaagagccgcgtcgaagaaagactgctactcagtcctctgaacttcacaattctccagccgaccaatttcatggacgcgtacccggccgctgatctcgcgaagatagagagcccgtctatcaagtatgcctggaacatctttaacccgcatgtggccaatagtctagttgcgctcagggatctggctgaagccggggcccgggttttgaacgagcgggaagtacactatttcgctcagtatccgctctgctcgacgttcccggtgtctgatgtggattttgttgatgtcattggggactatattggtaagaagatagaggttccaactccgactcttgaagagggcgctagcaaggtgctcaggcttttatatgccggggaaagcggcgtgtatagtggggatcatgtagtctcggatctgagatggccggccgcaaagggagatttacgtcctgatattacaagggacgaggctgagaggctggttttgttttataatcggcgtggattgaaggggaatcccagggttttgaggtggttgattgggagggagcctacgactgttgctgagtgggtgaagattcaattggcagggtagttttatctcagctagctgaactatcataggcaaatgcttcattgagatgatcatatactgtaagatgaactttcttgtttcaattgagaaaaaaacaggtatcggaactcccgtttctagtcgggatgccgatgtgccgatgaaaattttactcaagctgtctaaatccccgaaatccccggcatttccgaccgatgagagaaagaaacaaaatcagtgctgttatagttactccgtgaagcttccacttattaatttatgaattttgccgccatagccaaagccatcgagggaaagaggggcaaggtcagatgagcatctgacatcggacaaattgattactgcatttattctgcttaacgagaggattcctatggagcctccctcaatctctgcgggctttccagcacatatttcgtcatgcttccgatgtgccacagaatttgtgggcgagctttatctaacttacagagagtacgtcatggttctcggtttgtcctgtggctctgagacatgtggggtgccaagaaccggctagaacgacttcgaagtgtattccgtatcgcaggacctagcttgacagttaacgctggagattgatttatctgcccagatatctcctgatagcctggctagctctagaccctttcgagtatggttccgcttgtatcccacgaggtgatccgctaaaggtagagatctcgacctaataatgtagcgaggcaggaaaagcgatacgatcgagtagacaagtcaatgcgaacgtgttattaccgagtcataattaaaaacaatccgaaggttaacgaaagaatgttcctggttcatcagatgtgccgggattcaaaacaacagtccagatcttgaatgggtatcagtggattttggggcaggggatgaaggtaggagaaaacagaacgctgggccgccgcgatgaatcaaattagatggaagaggtaagcactatggaacgatgcaaacggtgtatatggagtgtgcacccggagaagccaacgcagacatgcttccttgcagtggtgatatcgcagaatgctcagatgatacccacagaagggtagatgccaaaaagaaggagaaatatgtattaaaaatgcccaaagccccccttttccagttattaggtctacccgaagcgacgcattccagctcggccatcaaaggccaaaggccccgagtcatttcgtggagtcatcgggttgtcgtcagatgttggcgtgtcggatcggacttgtgattggcgacgcgctggcacactgagtggttgagtcggttgccacccggggatgttgatagtggcgctgcgggcgaggtcatcgccatcggtgctggagttagggcctggcgagactgagcttcgactatcgtggtcatcctgtagatgcaggttctcaacatcgttggtcaggttttcttcagcaggatctcctagctgatcagatggtccttccgtattcgcctcggcgcttgaatgcgcctgcgtttcatgctgctcgccagaatcattggctgccctatatgctgccagttcctcctcttgtctgtcctccaactcattcgagtcatcgacctcggcgctgagatcggtgaatgcacggcagttggggcattggaacattgggtaatcgggggagtgaagcagacggctgatacatttgtaatgccagacgtgcgcgcaggctgccatgaacaaacactgatagggccgctttattatagttagtagatgtaggattggtcagggaaaatagaaaaaaacgaaccaagacagagccaaggcaaatcgagcattcacgacatcccgaataatcagcagtctcgcccttgcccaagtttttgataaggctttctgtgtttttgctggaattcttgttagcgtcacacgacactcgggacaataggtaagatcgcacttgaactcgttgggctgctgctgccacgatcgattacattcaatccgaatgcgaacgcatcggaaaatcatttcttctcctcctcggaagtcgatacccaactgcacgatatcgccatctttgatggagtacagacgggacaccatattcggctggctcaagcgcatgtggttcaaaaatgtaccggaagaactgccaacatccttgatgtgccactgtccattcacatacaagaactcgcagtgtttccggctaacgaccttcgacttgaaccccacgggagcatctgaaggctcggtcgggttggaggacggtacaccatcacgctccgagtatcgtccgacacgaataacacagctctctgatggtagggtccgggagactgggacgaaaggtaaagagggtctcgagctctggagggaatcttgataggggaagaaccgaatgatcgctttggtctccatttttgaaggaatcacctcctcctctgccggagcgctggtaggtgcgaccgcattgctttgagcaacggcgggttctgccggttcgaccggctctgggggcgggttggactcctgcggggtgggctcctgcgagttgtttgtagaggtctctaacgtgcgaggtggcggtcgaggggcagccgaaacgctcatcaagcgtgccatagaattgggttgggtatggtcggtcgagggcgtggaattagcggactcggtggatgatagttggctattgaggtcgctagcaaacccgtaactcggcgcgggcgcagaggtgtaacgagaaagaactggatggtcactttcagggcatggggaagctgtggtggagtttgtcggagagatggagtccggattggagaaccgccaaggaattcgactgctcaaactgtgtcgagccgagcgctgcccgctaggcgaggaggtcagattatgggtgtaggttcgtaaactgaagcggcgcaggcgactggggcgagggcagtcaggtaaggaggtggaggcggtgactgaagtagacatggattcgatttggcgaccatgaaagaatatcgacagagaattaaatagtgcccagagatttctgaagggtaacgtcactgggatctgcaactgggctgatgctattcaatggtttaccaggacatcatatgattagggtaaagggatgaccttggaacgagaagagatttcaaagcgatggaaagatggaagaaaggagtgaaggaaaagcgaggagattagaagagcgagaaaggcagggtgggatgtttcggccttcttgattgtatatactgtcttgtctgtcgaatctttgggatctttgctctttgccatcggttattaaagccctgacagtcagcatttcttggcaggaagatatctccccgcatagttaggatatataacgagagtatttatatgaagtatatggaataagtatatggaataatcgagagcgtataatagcaggatattgataaattactaaatccgatactaacgatattcccaagtatatacttatgcatatgtcgactgtcatggctcgtccttacttcatgtaccacgcatataggatagctaagtggtctatgctttcacataggcaatgtacatctctgtaactagttatgtactctattctgtactccctatatatcctatatgtgatctataccaaagcagatatcattatgtcgaatcaactagaacaatagctgaacaccacaggttacaaccttagatcttagaagatgtggcaaataatatatattaccaatgaacctgtagggcctgggccagttatctgtttgtctgacaataccctaactattcctatctacaaagtggcattccatgtgatacctgcaagtcaatctctaaccaccaccaacatgcccttatccatatgtgactctatctggtgatcatctgcgtcacttacaaaatcacaagagcaaaggtaatgccttcattggtgtatagtgtagcacggaccttgacgggacgctagaaagtacgctttagacggcaaaagacgttgaacccgactagataatagcgatgtagtgatataagaagtatttcaacatctatagagtaagagcagtgtctagaaatatgctgtacaacttactattattaaccagtagttgactttatatgatgcagttgatctccctttccggattggtcagcctagagcttcccccggggccgatgatgtatgtgctggagctggtgcgtgtgggaatgaaaatgaaaataaaacccatggaagagatgaaagaggagaacaaaaagaaaacaagtagattgacctagtcaattcgatcaatccaacccccaatgtatcctccaacacatagaaaagccattgaattccaagtttctgccgtaggagactagttcgctccctctcccctcccttaatgaaacacttgcaacttccttccttccagcatcaggaggcttccctccttccttttttctcatcacgcggctttttctttgtgtttccctccaaagcttcggctttattcaactcccttattttcaccttcgccgactcgtctttcgcatccctcacactcactagaccgcgcccgatgcgggcttgctagccagcatgagtggaatcgcgaatgcctgtctgtcttgcttttcagcagtggaccaatggtgtcatatcacagcatgtctcggtcccatcggagctcgttctcgagatggtatctacgaaacaaccctggccgataatgagcgagaagcggtatcagatcttctaggctacttggagaacgtacgtgctcgaccgattcatcattctgaaccactatcttcccttctctgaagcatagctggagactgggttcgcctgggtaccgccctgcaccgagcataccgctgacttccaattgtacagcgcgcagagaccgacttcttccacggcgagccactacgagccttgagtacccttgtttattccgaaaacgtcgacctgcaaagaagcgccagcttgacgtttgctgagatcacagagcgaggtgcgtatcgccatcttgctagcaatgatgcaagagctgaccttccgtcttatctacagatgtgcgcgaggtcgatcgcgataccctcgaacctatcctctttctacttcaaagctcagatatcgaagttcaacgggctgctagtgcagcgctgggcaatctcgccgtaaattgttggtcacgtccccgtcccgtcacccatcacccatctcctttcccgcttcccacacggtcgctaactcggtgcagctgagaacaaggtcttgatcgtcaccctcgggggcctatctcccttgattcgccagatgatgtcgcccaatgtcgaggtacagtgcaatgcggtcggatgtataaccaatctcgcgacccatgaggagaacaaggccaagattgctcgctctggcgctctaggtcctctcattcgcctggccaagtcgaaggatatgcgtgtccagcgaaacgcgacgggcgcactgcttaacatgactcattcgggtaagtggctctagttgattcgtctggccgtttctctaacatgaagaccagatgacaaccgacagcaacttgtcaatgccggcgctattcccgtgctcgtgcacctcctctcatcccccgacgttgacgtacagtactactgcacaacagctctcagcaatatcgccgttgactcgacgaatcgcaaacgactcgcccaaaccgagtcacgcctcgtgcaatcattagttcaccttatggattcatccactccgaaagtccaatgtcaagcggcgctcgccctgcgcaatctcgcctctgatgagaaataccagcttgaaatagttcgggcgaagggcctttctccactgctacgactcctacaatcctcctaccttcctctcatcttatccgccgtcgcttgtatccgcaacatttctattcatcctcttaacgaatcccccattatcgaagcgggcttcttgaagccgttggtggatctcctaggctcgactgacaacgaagagattcaatgtcacgctatatccacgcttcgtaaccttgctgctagctctgatcgcaacaaagaacttgtcctgcaggccggagcagtacaaaagtgcaaggacttggtcttgcgtgttcccctaacagtccaatctgagatgactgctgcaatcgctgtgctggccctcagcgaggagctgaagccgcatcttctcaacctcggagtgtttgacgtcttgattcctctgacaaactctgaaagtattgaggtgcaaggcaacagcgcggctgcgttgggcaatctgtcttcgaaaggtatttccccttatatttgtgtgtccttataagctgctaacaaattcgtagtcggcgattattcgatgttcgttcgcgactgggcagacgccaatggtggcatccatggctacctccatcgcttccttgccagtggagatcccacattccagcacattgccatctggaccctcctccaactgctcgagtccgaagacaagaagctcattggatacatttcacgatccgaagacatcgtgaacctggtcaaggttatctccgacaagaacatcgattcggatgaagaagatatagatgatggtgagggtgaagtcattacgctcgcccgtcgctgccttgagctggttggagctggtcctaagcagacccttgtagaagcctgaaccttctgtttcgtctggttataccacccttgttctcacccttgttctattttttttcggtcccttctgctgacgatgcttcctcgcaaacaaggtcttgtgtcctttgactgaatcgggattttcttttcttctctcattctgtcgctgaaagcgattattttcagaacttatatagcgagtaatcgatttttatgataacttaaggggacatagaaataaaggcgtttcgtcaacttgacaaccttagatggataagaagtatgataagctaggtatttgcactttcccctgctcttgtcgcaccaatctcaaccgtgagcaagctgggacgacatcgagacttgcacaagctggtacgttcttcagatctcacgcggtgacctcgctgtactaaccatccgtctttttacagaaatattctgcatcatgggcaagcaggtaaaatggattgtcgactactcgccagtgatccttgcatccaatgcctaagttggatcagacccagctaacacttcaccaactgtctccgtgaggggatgtttgtttcatattgcaactatggcgttaccccagggatcggtatacaacacactaccactcacaatgggtcgaggactattgacacaagtgggctgttcaggtgatctcgtcggtttcatcaacagtcgtagaatcgtcagttgtgagattggagtcttcaatggtttcaatttggaagacattctttgcgacagcaatcttgggaggtgcagaatcttcggccatcacatcatcatcctcgtcatcctcgtcgtcgtcgtcatcttgttgaagagcgttgaacgccatggttttgcggttggtgtcgtcccaatcagcctaattaaacgtgagcacctgtacatcacgaaacaaccatctgttttcatactcttcgggagttgacggtcttgccacgagccatgcttttggccttcttgatttccaattgatccatcacggcctcggctcggtccattcccttttgttgccttaatcgctgggcccgtgaaaccttgtcattttttttctgctttttctggatcccggaagtcgcacggtcagccagaaccgaaggccttgttgtgttaggagattccgctcgtggaagcgaagtcaacgacttgtcaaggtcgagacttggggatgctgctctccgtgctgcgcgggaacgctgggactggcctgtttcgaatattagatacccaaacgtcaatgtatgcggcattcgtattcaacttacttttgctcttcgccatggttgctgttttgaaaaattatcaatctcgtgggatgagatcgctatcgataaaaaaaagtttacggcagacgaagacgaccaaaggcgcaccttttctacgcaaacatgtaatttgatgtccctttctacacgcgtcttgacactcccacgttctctgtcaatccatgctactgctcatgctggcagataccttttgtcacagatatacgtctggctttattgacaatgaacacccgcgacgtgcgctctgagatcttttccaaccgccccgatcagtacgcaagtcgcaacagtcattatgaaaccgccctgacgactttacaaaacaataaagcattagcatacatatttattgctcttatttcaatctgtgtctttctcggttacctcggacttgttcctatatcgctattccagctcccctgggatctcattgtctattttacaccctctcgaatcgttgtcgctttagaccctcaaatatcgacctccaaccccaacccgctagcctcgcctttgtccttccagaataaaagtgacgcgatgagacgtattcttggcttagacaacaacgtctacttccctttcttctcccggtcaaaatcgctctctattttcggaaatgcgctgctaggaaacactcaggatgccacacctccggggctcggaaattggaacaactcgtgtttccagaacagcatcatacagggattggcttctttgaaatatctcgccgagtttctgggacacaacgtggacaacctctcggacaaggcttccgtctcgacgcacagggcactattagacctcatcgaccgtctgaatagcgcctccaaaagtggaaccaagctgtggatctccgggcctctcaagtccatgagtagctggcaacagcaagatgcgcaagagtatttttccaagttgcttaatcaaattgaccttgaagctgagcggtgttcacgcggagagactttgaatatgggattgaagatcgcgggaccggatgagaacatatttcgagacagcgactctaatgacccggtggtgtctgaggggtccgaatcgctctcatcgacagataagatttatcttgatagggtttcatcttgcaatcctctcgaaggcctactcgctcaacgagttggctgcatggattgcggatggactgaggggctctcgttgatacctttcaattgcctcactgttcctctgggcaagagattctcgtacgatgttcgcgaatgtttggatcaatacatggcgcttgagcctattgaaggcgtggaatgcgccaagtgcacgttgttgcgtcgactggagcagcttatcaacttgatcagtgggattgaagccgatgagagtcggtcagacagctccgacgaacctccacgatttaatgctgtgaaggagtcggcctactcgcggttagaggctgtcaaggaagctttgcacaacaatgatttcagcgaaaacacattagcgaacaagtgccatattaactcaaagaaccgagtctcaaccactaaatctcgacaagccgtcattgcacgggctccccgctgtcttgctatccatatcaaccgcagtgttttcgacgagtacactggcacgttggagaagaatctcgcggcagtcacgtttcctcagatgattgacttgaacaattggtgtcttggcacccaacctcccaacaagcacggcaacaattatgagcgttgggatacaaacccctctcggtccatgcttccccaacctggtgaatcaattcaagtccctagcagacaatatcaactacgcgcaattatcacccattacggccgacatgagaatggacactatatctgctatcgcaagtatccgacatcagaatttacagccccggcaccggacgaaattcttcaagctgagggtgacaaggacaagcccgagcgttggtggcgcctcagcgacgatgacgttcagatggttagtgaaggtcatgtgatgagccaagggggtgcattcatgctgttctacgaagctatggatgattcctcgccgcgttcgactcgagctgcaacaccagaacatgacctagacagttatacagagtctacccagttcggaagtgaagaatcaatgccaaagaacagctccacaccatctactgtcaccgactgcgaatctgcctcatcccgtgagaccagtatctcgttgccgatggacgacttgattcctgccgacgtgcctgtgaagatctcgaacgtgattgacactaatgctcaggcgaacgatgaactggactctccctctaccattactgcatgatcaccttttcttcatacgttttccctactttttgcccgcatagccgtaccggctactgcatcatgatacccgataccacgttccatttgaggcgctgatttgaactccattgtgtttgggagtatgtgtaaatttatgtactattatgaggaatctgaacagaatgacttattgaagcaacacacttgaattcgattcagcctgactgtaattccgtagactcatccacgactcatccacgactcattcattgtggattgcctccgtctcttaaaaacccagtcaacactcggtgatgcagccttggggttcatatccccgcatttagcacgagcaccttgtgaaaggcgacccggtatgatggcccggcatcacctcattaagtaccttggggccaccacagcataaaactacatgaagactcctttcctcgccaaattagatttgcaacttacttttctacattctcgacgagttctaccagcaaagtactaattctgacgtaaaccgaatctgcctcttcccatatcgacgctggaaatcgttgaagctgtactcgagtctgtatagatcccgtcggagatctccccgggtcctcatttcctatctgatcgtcataggtatgatatcgtctccaatatttgataaagctggtcgttcctattctaattgaacagaagtattctataacatcttcaataatgtctatcaccaaatcctcacagccgcatgacatattcctcgtcaacgagctactcgagaacattcttctacatacagatatgagaactctattaacatctgctcaacgcgtatctcgcgtctggaaccttatgatcaaaacatcagtccgactccaagagtccctcttcttcaaaccctctagagagatcccagatccctcacagcgcctccgcaatccgctcctagaagatatcctctgggcccaattcttcctcaagcaacaacaaacctcagagtcgaaaatcaccgaagtaagcaggtttccgctgcgggaacccgagcgtcgcaagctcaatatctacctgcgcaaagacgccagttggaaacgaatgctgcttcaacaaccaccgacatcatcaatcggagtccttgaaatcatcaaaagatcagactcggaattcaccaaattatcgaccagcccaaacgcattcctacggatgggcgatctcttgagcctcctccaaggaggtagcacgctaattccaacccgcaacaaatggataatgtggagcgggcgatcccgtatcaggatgcccttgaactttgaatgctggacacctaaatgggtatatgagccaagtaccctgcggccggtccatgaatggatcccggaaaatatagactgggatagtctccggctggaggtggcatcgatgtatttgaatgatttcgactgtggtgtggtgattgtatccgaacggagacaggtgctcttccagggtgaggatcgaattcacagggagagcaaacttgatcggcgactggagaaagtgtttggggggtgtcaggtggaggttggaaggatgcatatcaatcactcttggattcctatcaagggtgttggtgctgatcggagatgggttcttaggccatgttcggctactcctcttgttccgatgctgagtgactcggaggtttcagattcgtcttctatgtcttcggtttctttgtctgtataggggatatactcgaggctctgcacgggcgtatatcttgaccagtttgaagagatttggaatgatactctgctatagcatgctggttattgcataggaaagaaatgatacaaccgagagtcgccgaccgactgtggcctgccggggttgtttgttacaaacagcatcgctcttcaattgtatgcatcataatcacaatgaccacttcgggaatcatgatcagcctaggtgttaggataccttgtagtataggaaagacatagctgagcttagcttaagcgtcttatgccccacttccattcaagaatagtggagtgtttcatgattgctagctttgtcggcacgaaagagggcgttggagaggcagcgagatattccgaagcgaactatctggactccttcgagaccaagccacacatttcatttccggcaaatcccaacagaaggtcccgaccctcatctacaggtgcatattccaaagagccaaataggaaggaaacacaattcaccgccagtccgtctatccgacccgtgcatcggggataaccagccaggcaacgaatccatgccactttagcgcgaccagggttgtcacaatactataacgaccctgttcggatattggccagcctgtacgaccaggatgtttcttttgctgttgaaatccaccgtggcctctaagcgcagagcgtggatgtcagtacccagcgcagattgaaacgtcgatgcgcccgaagcattcatgcccggcattgcacaggaacaacggctcgacaggacaaagcgattgccagctaggccgaagtaggcaagtcgaagaattgcagcgaagacgcatcattacaatgctaatgcaggttcacggcctaccgcagtttctcggctttgcacatgtgccattgcgatgtgtcgaaacgttctcgaaaatggcaaccggaggtatatactgtataatgacggtatccgttggcggagacaacccctggatttcgtttctggtcgatgttctgttccgttttgggaatctcaaagcgtatattctactctgtattgtatacgggaaagcgaccgtggcgatcgcatcttacccggtcgcaaatatcggtcaagacagataacctctccaggctgtgagtcgatacagaataagctctgactcggagaagataaattgattggcgtcggaagagaggatggctggcttttgtatccaatcgcgatggctgctcgagcggtctcagagatagaccgtctgatcccacagccattgcaatattggcgttggtctagattggggcgactgtgctatccgtgcggatcttcatgcacgcacagggcgaggactagggaggcgttgattgatatgaaagttgatgcttaagcccccccgggacagtgccctaggacagtggacacgtcttacaccgtcaacccgccactgccatcaccacccttgtcgatcgatgcagtcgggaccgcggatggtgtcccggaaggatctgagttacttcaccgtgtagatactccgcagtgcttcctctccttcgacgatgtgctatctcacattcttccgaatccccgccagcggaatgtgggtcggatccccatggggtggatttgttttccatggttccgtgtctttagtgcccgcgtcaatggatgagttgcgtcggaattcgtgcagatctggaaatagcatcggctattaagtcggtgagggtgtcggaacggtttcattatcttagtgtctataaaagctcggctcttttccgagttgatacggagtagtgaatcagatactgaatcaggagaaatatgtacctagacaagtggattcatcctctttcttcagctattccatgcaagaaacccgaccatctgtccttgcgattttagttcaagatcttgcatgtgaactgcatgactgcatatgaggtgcagggtataagctgcagggaaacccgggaagggctggaagggactagcgtggatctgagctccgatacacttctacacggctagagctggccaaattgaatgcaaatcaagctcctttctgcatctatttcatacttgagtccagcccacaactgtgcatataaatctacctgtacggagtagagcgtgttgatccaagctcggtttcaaagcggcgtaaagactaaccgaggtaaatcaacagaccgagctgtcgtctcctcgctgaaacaggaaatttctgcccaacataccgagtattctccggaattaacgtagcttgggtttgactcaaaaggaacaccggagctctagcgtcccagtgttccggcgcggaactatctgtccccaccatgaaacccaggaggcaggtaccatgacatgcattgggtacctatcgaagccctgagtgcctgaaaagggggagatctgaacacgacgcgcaagacagatcgtggactgcgacccctgacccagcaagctctcacatacttggaactatgtctgctcgaatatgagttcacgagtggagaacggagctccgtagccggggcttcgaaagcgttgaaccgcgaggctgtagcctgtcatgtcgatctgaatttgatttcagctcggtagtcgcatccccgcttgacccctttccaagttttctctggttccccggcgggccgagacgcggaagtctcaattatggagtaagcagttggaaccttgggagagagtaggaggcgtgggggggactctagtagcgctgcagggaattagatatgtatatttgccaaagtactcttgcgatcagtatgtcgggagtatacatctgaaatgccttggagatgataagtatgagacagccgatcatgcgcccgaacgggagggtgcaaattggtcgtcgggacacccaggatcacggattgatccacttgggccggggaagagtgtaacattcttccccgtagacgcgagacttgcagcaagcaagtcattcggtgcatccgacagatcgtataggcatcaatggctgggcggcaatgggcatggcatttcggagatctcgaaaatcaggcgttgataaatgggaaatgcctttgttttaagtggcctagatatggacgatctagactcgagacctaatttcttgattttcgaaaaaagggcatccactagagcctcggtgtgactgtggggtgcgctctgatttgtgcgatattaaacggccttttctcggggctaattcgatccatggacaggacaccgacaaggttactccgtacgagaatactccatccggagtagaacggtagcatcaggcacactagcgaggaactgcctttatccgctagaggggagtcccgacgcgccggaagcccgttgatttccaatccaatccagtcccttttcatttagattccaggctaaggcttctagagggcgacatgaggcttctagactgaaaaaccgaatcctcgggcttgagacctggcccgaatgtggagacacgggggaactcccttcgacgctttaaaagatagttcgttgtccccaggtagaatattcttcaacagtatcatcggtgttgacgtgttgacgtgttggtgaccgccaatcgctaacaaaccggattcctcacgcgagtagggctgcaaattctaattcggcctgcagcttccgcgactcttttttaccctccccatgaagcggtgaatccgaggcttgatcattggagaattgccatcggaactggaaaaacaatccgattttatcagaccagatctgaaaggttgttgggcagcccttttgggaaatcctcgatctgccgcaagggggaatcgaagccagtgatatcagatatctgattgtcgaccttgtatatgtaccatacatattatcccaatctctgtgtcagactcagtcccagacaaagcgctaaaccggggatccgatctttccccgtgtgtcagaaatccgatacatctggaatcaaagaaaaaaaacaaaaacaaaaatcccgatttggatttatcttgatttatatttatttgggttgaccagttccacccgtggacccacccggcgttccttccaggtcgatcgacagccctttgtttgcggaaacctccttccgcctgattgttcggatttcttttttatttgtttattcctttttttcttcttttttctttttgactttcctatttgggatttttcttttattactttcccttttttgggaattcgattttcttgactgcaagggtgtcgggaagtctagaagtctttccccggctttgatctttttgatatctatttgtgtgccccttctcaccgatcattgataaacaactcgcctcgactcttcttccttccctcacttcgccttccaccctacacccttcacactgttgtctctctcacctactgggccctggtactgccatcccttttcaacatctactcatatccgccatcatgattcctattcagactcgtctccgtgagatgtcgctgcccaaggcggtggctcctatcgccaacaccgatccagcacatcccacctttgcctggagtggcagcgcctcttcttccatgtccagtcctttcgcccctccaccaactcccatcgactcgcttctcgatatcaacccacgcaagtcgtctttctctagtgagctgggagccgcatatgcattcccctcctggcccaaccgtccctctctgtccagcaacgactccaccgattcctgtgccagcgcctttctgtctgacgacgacctcctgtggatgccagagaactcggccgctgagcgagtcgtggacgaggccctcaaccaagacgccactaccgtctgctccgtgaccatggaacagcaactcttgcgcatgcgagccatcgccgagcaagaagaccgcgccaacttcctcgccaaggtggaagcccacgcacgagccacccaggctctccgttccgcaaagcaaagcattgtgacagagcgcgaggcatcgaagcccaagaagcgccgcgtcgcgcccgctcccaaacgccgtgctcagtcggcatccaaggtgctcggttaataagctcaccggcagaggccggtgcagcgcaggcgctctccgaaaaccgccacattatcttcacattcatgtcattgccttgccttatctttaatttcacccccgcatctctccgacggtgcagccccacacacgacggtgcctaatttcgatttattttcccagccgtggtacccgcgagatcgcctcattcgacactgcgaatcacactcgcagccacaatctccaagcacaacatgccatggtcgatcagccacatggaagcttcaccccccgggtggtattttccctgaatgcgaccatgcacgggccgacctcgggatccatgccagggcccccgcgcttacctaatatctcgctgtcggcgcttctagaaatgcctgggccaccgtcacctcctccgtcacgtccgaccctcttgtccttcacaccgctggttcctttggctctctgactcatttccacttccactttcacttttgtttttcttgtttttcctgtttttccctgttctcttttcagcgaatccgttattccccccatcccacgaggatcatgttcttgcatggagttccagcgattcaagtccttttcggcctaccaggcttgcatccatggcggtgtttctatttccttctgatttttctcggctcttcatgaatctgtctttccagcgctttgtttcagataccccgtcttgtataccccactattttcttttttttttctctcgttatcttccacgcttgatatttgaaatttcaacagcgctagttctctgatccgctatcggaatattgcgccacgtgccatatcaaatttgtcaatagccgtttagtacagagtacactaggaagcctgaactaagcacattgaccaaatcctgaaacaagcccaacaacctaaaataaaccagacccattatccaacaacactatgttgtatactcccaacgccctcgtacttttaccctagtccccgtccctgccacgttgatgtagatggagcctactgcccgaaatgcgcacaccctcgaaatagaataatccaacagcggaacgccagccttgcccgcctcgtgtcccccgcttgagtaactgcctgaccttggccaacgtagaccccgggaccctaaacggtgaggctgtaacagcttattgttgtctatgtatgacacgagggctgtcgttggaatgcaacagtgagatcgggccgcctttagtaatccacaatggggcgacatggttgacctcatcatgggactttgtgtactccgtaaatgtacatacattagtggttgataataaatagcccaccggagaatatcgtgaagttacggttggggttggggttgttgctaggctgtttttggccggagttagggtcttgcctggattgccctcgccatttttttctgttggcggggttcactagtcggctgtggttgaataaggaatgttaacccgaagttggtgttgactcttgagtagggatgctaaaatagccctggtacctatagtacatgctggattttagcgcttcactccctgtctatcacaagcatacggagtacattctatagtatagttggcgtttcaaagaaagcctcgatccccgcacgtagcgctgagctattaccgtcactcttctttgttgccaccgttggttcctctcttctgcatttacgctatttgtcgtggatgtgttgcaccaacccacaagagcaaaatatcaagtctgggcatcacatttcatgaatttagtcgggcacatgcttcaactactgtgttggttgttaccaactcgaaagaatcccggtagattgtgactgatatcacattccaatgagcggatcatacgtatgcctatcggagaagcttccgtcgagggcaatatcatctgataatgattcaacgttggattgtggtcataatccactagcattcgaaaatcaaagcgtgcgatacatgcaggtcaaggcactgtggatacccatatttgacgaagtagagagcattcttcaacgagtagtggccgcgtggtgcagtgcaggactttaacaatatatctactcaagatgatgtcagagacgttatatgtgaggtaacacttgatatcttgtccgaagttccttttacttgtctcttttttatatttttcttagaaatgagcagtatgtgactgtgccgtaaagccgaagaacatacagagcctagaggcgaatatgtatagcccagaccggatatgcagaaatccgacgagcatcattagtgtaacagcatcatcgatatcatactaagggtagctatgcaatttgtaagagcaaactgcatcgggggtgttactggaaaccatgaacggctgaattggcatataggatccatcccggtactcacagattgtcaccggtagtatcagggtgtgccagatagtcgagcctgatctatgaattagcgaggcgggagttaaagagagatttagttactttaacacaaatatacatcctagtcacaactccaaagggataacttgacactaatatttatccgcatggcagaagcaagggtgaaaccgaacttctatatggccagagctggtagtattgagcgggccaaatgtatccatgaagtcttgtaatggagaaacgatacttgctaccagagccttagtgacagctattacaatatcgactcgcattcaaaacgaccaaagtcgcggtgaatcgtcctatgtaagagcacgccattgtcgaggttgtcgattgtggtcacttggagagtggccagggttaaaggaaaacatttatatatcattgccatatgaaagaattcctagcctggaagccttgagctatcagcaccttaagctattagcctatagtctttccaagcagatagacaaatggtactataccgtagactgattgaacttgccaaaactgaatggtaggatgtgtgtgggaagtgagatatcatgggtcaggagaggaaacatgcttctatatttctttctaaggtctaaaagtgctctacaggccgtctatgatactctatttcctaaatgtagtcacaaatgaccaaaatgactatcagcccacttgattgataacctcaccaacacaccacttctcaatcgtgttcttcactgcagcctgtaggttttgcaatgttctttcagaataccaggcaaggtgaggtgtcaacaccagattcaagcccgctgcttctggacctaacaacggggaatcacctctcccagcaggttcagtggcgaaaacatctgtagccgcacctgaaatagctccgcacttgagagcttcaagcagggcttgctcgtcgacaattccacctcttgcgacgtttaccaacacggcatggggagacataatctggaactccgcagtagagattatgttgagcgtctcagcgcttcgtggcaagcacagaacaaccacagtcgactttttcaagccatcttggaacgggacccgacccggtcgaggagatacacctttacgctcagcaataatcacattcatcccgagacccttcgccatggcctcgattcgtttgcccagcgatccgtatccaatgatacacacagtctcatcactacacagcaacggggcctttccatcaggtgcacgaacccgactgagcagggtgccatgggtcttccactcagtatcacgcgacaagtccgcaggaactgcaactgtggcgttatggagctccatgaacttccgtcgagtggcaaagtagagcccaatagcgtgttcactcacactgtcaatattacagccgggacagttgcacacaatgattcctcgtgcggacgcagctgctatatcgacgcagtctgtgccggtcgccatgatcactataaggcggaggttgggggtaaattcggggctgaggatctctgccgtcaggcgcgtggttgtcgttataatgattgtagcatctttgacgcgactgggcagatcaacgagatcggtccgtcggtggactgcgcgggaatgccgccctggtagatcaaattcgggaattgggcaatgaacagcctcaatggcgacgatgtggtgcatgatgttatttgcggtcatcattatgagaaaaaagagaagatgtggtactggctttgaagatttctaatgacttccccgccgtaaatatctccagcgcgataagagtcatatatacacttccttgcacgtgacgtgaccatttatcttggaaggcacgacagttcgccaccgcaacctgcaatcaacatacaaccactatatacaatggccgcctcacgctcagaggttagtccccttgggtttgccgaagaagactttgccgcgaagaactatgatcagttcgaggaatgcaacttacaaaatgacaatctcttccctatcgacaaattcgatatacttcgatcacgcacacccgcatcacttaagacatacaagctcatcgagccggcacttctgcttatctctcgaataattcttgatcgtccctccaatctcggctttgctcgacggcgagatacaggtgcccaagacgtgttcgttgatagggaggcagagctttgcctcccagatgaagagattattgacctagttaaaaagcatatcccagatcttgaactggatcccgacatgagtgcaaacttctcatcatatggagaaacaatccttcgccctgaatcaccctcggatatggtaaggttggactacagccttttcaactattaaaatcataagctgcgatccaatctcagaaaatggcagggcttctattactcgctacatcgctaggccatcagatggcccatattttggaattccgctgtatccgtgcctgcaaactccgcactgaagatgaaccttttgaaataccacctggcattatatgccgtgaggccggcacggtctgggagctgagatcctttggtggccgaatttatccagtctgccagcctgatggtagtctgtacaacattcaaggcttatgtcttgagattgcatcttgtaattttgacgtgatgaagatgaacgacgatctcctggaggaccaggttagcgcctcaatcagaagacagacccggatgctagatgatgtgcaggttgaaacagacagcctgagcaagaagagaagggtccgtagatttcctgttcttacgaacatttgcgggggcaaaaagtcgagcccaagcttgtgatgggattgtatggtatcccctaacttgtattcttataccatcgatcaaattgttatgcacatgaagagagtggagggaccaagcctggtcattagtctagtgaatgccactttgaatcgctctattatttttcaatcatcccatccttaaagaatatatacatatcatccactgtcactatgcgttcgctctacctcgtcgcaactctgcttctaatccaacatcatagccccttgccaaacagttcttctcctatctctttaagcagcggctccttcttcacggcctcaaccttcatctttccaataaccgtatctgccacacccatagcgcgacaaatatcaattagaggaccatccatcggggcttcgtaaacaagaagcccaagagcaaacaacaacccatgcaatgattccacgctctcgttctcgcgcgaaacggcttcaagcaatgacgcggccagttcgacctgatcttcctcggacagaggatcgggctttccatccaagcgggcgttgtgattgaatgaggcaaggttgtacgcaaaagaggcggcaacaacgcggaggctcgtttgtgaatctaggagggagttggtcgcgagacggagacaggtctcgcggagtggggatgaagaagaggtgagttgttctgggtatagaggggtgctgaagagattgcaggctagttggagagccacgatgcggagattgtatggacatgaggatagatcctcttgggatagcggtgcaaggagggtgaggagggttgcgtgttgggcttcttcggcgaagtagccacttgcacgtgggtcaagcagaagaaggcgaactagatcaaccacggcaaaatgactgccactgggaagcatcgggtacatggaggtcaatgttgtggcaaatgtatgcaaatcagggaccctgatatcggcgacaggttcggtggttgagtgacgctgcttcacaaattcaataacctccgcgacaccgtggccttccttgaacgcgtcaggaagtttttgaaggagcttttcgagtggtggaaccttcttatacatgacgaaggttgtaatctctcgctgaagactgggaagtcgcagttggcgatggggatgggccgggtatgccatctctaacaacatacgaacatttcccactagcttagccggggttgcaccgctccattgatcctgcttttggcccttcaaaaatgtcacaaaggtaggagtcgacctcacgctgtacctcgtggcaacatcgcgagctgcgccgacgtcgactttgatgagagtacctcgctcacccacttccgttgcgagctggtcatatgttgggtaaacagccttacagggcggacaagttgacgatgtgaagaaaataacggcgcaggaatggaaagcactggacagctcactttgcagctgactgagattgctcacaatgcggactgtgcccgttcttggatgtgccaccggctgaggtgtaggagggacagccctcgcagtagttgcttgagcacttggcccaggggcaggacctgtcccggtgccttgagtgacgcctttaagagccgcctcgatttgaggtttcatcatttgcccaaatggagtttccaggaaagtgcgaggtagattgataatgtggtccgggatacttttaccgacaaggaacattgcaaggtcttgagtgaagttattgcagttatgaagaaaaaggtcgtatgactagaactgattagctatagttccgttgctgaattgttaatgaacgaacctcgggtgtataaatggtcgccaacgagcccagatattcttcgataacctcatttggaagctcagtagtacctagcttcacgacctccatgggctgtccatgatgtgtactccctggagtagcggtctgaataccctgaccgaagtaatactcgattccgttaaggacaatagatgtatgataaatggcatccatttgtatccctgtcaaggcaagagagtactgtacaaattagaggttgctcgctttcaataacgccttgaacataccattcgggccataccctatgttcaagattagttggtatttaccacttgtagaactggaaaacctacctttgaaaggtcgtagacatatagtgagacatccatgatgaggtgcgtgtagaatagaacctttgaagtgaaagtcgagaaaaggagcccttgaagtgcgacctggacaggctccaatccgataacgtcagcaccggcacccctggaggctgctatcaccttcgatcgtgttctataacattttctacggatgtgatgtttgatgtttgatattcttactttggcaaaatggaatgtggtgttgtaaattgacgcgctctcatttctcactaggtatatactgcctccaggggtctcgataatacgttgcgcaacttcagaatccaataaaggtatggatacactagatcaggagaggaataatgaatttgaagctttcatatgctttaaatgttttcaatattccaataatcatttatacgcataattgtgtataataaagctgttgaagctggcggcatcgcatacatcatttcccaatcgccgctctccccaccttcgtcacctccagggccagatactcattctgtccatgccaacacccttgtaaagccacaagcacaagttctgttagtgatatctacatggtaagacatccgggatatcctcaatacccaaccaaacctgactccctcgcagcctcctaaaaagcgcggagacgcagccagctcctccgcaccggcagcgccaaagcgcggacgcgcatccaagcttgccaaggagaacaacatcaccggcgaagaggaaaacgaaatcaaagaagtctttcaccttttctccgacaagaacgcagacttcccagacgagaaggagggagtcattccccgcgaagatgtgcgcaaggcactggtgtaagctctgctagctctctccctccaatctacctacaatccgaccctctcttcctcaagcccctactcttcgactacagttaccaaatactaacaactttcccttcaacagcgccctcggcctccctcctacagactcaaccgaactcgcagaaatcctctccgccctcgatccaaccctaaccggatacgtgccctacagcccctttgtctcaatagcagcagccaagctgcgctcgcgcgatgatgacgccatggctgccgaggtcgacgatgcgtaccagctattcacgcgcggcacgaatggccccattacactgtcgcatctgcggcgcattgcgcgcgagttgaaggaggacagtgtgggcgatgacatactcaaggatatgattcttgaagggaatgggggtgctgggttgagtgccggtgttactttagagcagtttcatgatgtcatgactagagctggtgtgttttagaagtgggggaatttgtgtagactttttgatagatataagggttgggttcggcgtttggcatagcatattcttttagcagggagtctgaggggttgatactttgaagggatcccaaggttgttcgaaaatcgattatcatttgtaatgtcccattgtgagtgtaagtacatactttcctccaccagcttctgcgaaagacaggaaagaattaagcctgctggtactagcaaaaaaaaaaaaagagtagagaaacacagccagtggaaaaaaataatcagagcaggagcacagaaggagatatgacccgcgcatcaaccataaagaactcccaagaattgcgaaacttgtatcgtgccagagccgcgatggaggaatgaaagcaaaagtcgaaccgtttaggagatttcgtcagccatgccgatgtcctggctggcgctggcctgggggacagtgccgttgacaggagcagtgccttcggcagggggcgcatcgttggtgaagtaatcaatcatctcagcatcaagctcctcgacagtcttgggctttccgcggccggcgttgcggccacgagggcgagcagggccctttccacgacggtttgtcttctcagtaggggtcttggtttccttggccttgggggcagcggcggacttgggccgagccttctgactgtgaatgaataagcatatggatgcggacagctagaatgaacatcaacttacgcaatgcgctcagtaagaggcttggaggcagggataacaggaacgtgagaagcatcatagacaacttcgatctgttatataggtcagtcaatgttgcagtgaaggctagccagagaaaaaggatttaccttcatggggcggccatcgacgaggagtccgttgagctccttggtagccttggcagcagtgtcagccctgttaaattggatggaggcgatgccacggctagtgccattctggttgtaggtgagcatgacgcgcctaacggggccagcagacttgttgaagtattcctatagcgcaaacgaagacgattagtattttcgtcagacaatttcagtgagcgcggttctcgagtggtggcggcgcaaacgaggacggccaaaggtgagagagcatcagcgagcacacagcatcaatccatcgtctgtttcatcctggcattggaccacggagcatatagctccttaattgcaaccccatgcgataggtcgcaaatttgcttcccgcaatggaacataacacaccaacaaatatccatagtatcaagtctccacttcatccatacatccatcaagcggtccttcaacaaaagcattctttcacgtcgccgacatcatggcatagttttccaactaaaatccatttgtccatgaatgtgtcatcccaacaacgtagtgccatgtcagacacagtttaaacttctccgagtcactggaataggtaatcaccccatagcagcaaaactctttacggagagatttgagacaagagtctcgaataggtaggtttcagtctgccctctgaacctgttgaccactattccactgatgcgctcgctgatgcccgtaggatttcaaagtagaagagatgaaggaaatgagcggaattgaagagaggtcaggatgatgaattttcatcaatcatcctcggcatagtactcagataacaaggcaggtggatttccgcatgggaattgacacgagcaatgtacatcttttcaccgtactacaacacagtttgacttcttgtctcgcagagcgccagcaatgtgtatatatttgcagagacatggagaaggagcaaactgtgtgtgccgtccatcgaggaatatccatcgatgtgggaggtagagagaagtcgagagaccggtcgaaatcgtttgcgccgcgagtctcgagaaaagagatggcgatgaaagccaatatgagagcctttagatcaacataccttgacattggcctcggacacatcggaaggctgaggaggttagcgacaagctgaaacatcaatgagtaagaacttaccaatccgctgacaagaatcttgctggatccagtctgggcgacaggggccgggtgagcaggcttaggagtcgccttggtagacttcttcacacctccaacggtgggtgccttggtcgctgcgcggcgggaaccaccacggcgacgagcagtgtggcgagcggtctggcgacggctgccgacgagatcgtcaagagatttatcaaggttggcagacatggctgtgatgggatagcaaagctggcgatttgcaagttcagcaaaagttactgaatgaacgtgtcgtgaatgatatggcgacctaggattttaagtcgctttagaaagaagttgagggcacggtggggtcacgtgggttctcggaataggatgaagcaggtatgtttatggagttgaaaatgatgaatcgtgaagggaggaagggacgagagggtgaggagagggggcaggttgtagcctgattttgcactaaaccccttttggcgcggcccaatgcgaataacatcagccactttgattggacgaatgctacggagccccaatgagtatgtacttatcatctttgtcccttctttggtctgttatacgtgagatcaatatctcccaaaacaagcagaaatccattatgtgcaggtccagccttagagattagactatggaaaaacaacgcacccaactccaaaggcaagaagtcatgaagtagacgaccgataataaaaagaaagaccaacgtcctgagttcacaatatgtactagctcttgagagcttccaaccggcctcgcatctgcgcgagagtggcttcttggtcttcgaattcctcctcggcttgtggggattccggctccgagattttggccacaggtgtggtcgtgacgggctgcgcctgggcgagtttgccctgcaaaacttcctgcaggatcttctcgatctctgattctgcttccccttcctcatcttcaaagacagaagggtccatggtagcatcatcgaccatctcttcgataatacctgccctaactaattctgaagacagttggtgcatggtcgcagacaattgaggcaggcggaccagggtgttcacatccttcatgatcccagttgacttttgcagactgccctggattttgcgcgcggagaaggcttcattgacctgcattcccacactctgcagttgggctcggctggtattcaaccgtgtggtctgtttccggatgcgcaccagctcccttgcaaagactttggtgtcattgttggcttgcttggcctgggatggatttcgctgagcccgtttagaggcattgacaatgtactggcgagtctggctgtcgctggcttttagccgggctagatcgcggtcgagttgccgtgtatttgtgcgtattaaagcattgcattttctcatctaatagatcatctttcattagtgtcatatttccaggcatgagccacactaactgcctacctgggcttgcgggtcgggcccaaagaacaccgccttgagactctccatgaatgcgctcttgcgggaatggggatagaaatcgatgataaaaacaagcaggcaaattaaaggtgtgagggatgtttaacaaataagttcagtctcggggtaaggcttgatcagcgattgacgctcatgcccggtgcatcgtagagataggcggggcaaggctaattcgttgactatgctgtcgcaatttttgaaccctcaggatactgtatgataggacttttctcgaagaccaggatcgctaggtcttcggttcagtcttcagatcagtacacgctgatgcgactgtcaatattcgaacctagtagaatggtaccttgggatgctacgctcagtggtatccgaccgggagctgaagctgagtcagttctgacgtaatacaatgtcccacataattcatgcctaaggcatgcttctaccagtttctacaacatagcaatagtaggttcgtgaatgagcttctcttacacttcttctcctctctttgaccacgttttctatcttcctcactttcttcacttcttccagttatctttccattcctaattcaatatgtctcagaccctgactcccgaaggtatgtcatgactgctctactgcttccccgctctcgaacgcgggtctgcacattttgcatagaaattactatgacgttatcaatatctaagactgttttgaaacattcgctatgccaattctacaatttcatttttaagtgagatggaggcgctaacatgctttacttttcagttacatgggctcagcgttcatccgactcggaccctgagcgcaactacctttacgtgaacatcaaggctgccgaggttcccaaggctgatgctaccctcaccatcactgagaagaatgtttctttcaagggcgtctccagaaagggcgtaacatacagcgtctccctggacctctttgccgagatcgaccccgagaacagcaaagtcaaccacaccgaccgcgatgtcgagctcgttctccggaagaaggagctcaaggaagagttctggccccgccttctcgagagcaagcagaagatgcacttcttgaagaccaacttcgacaaggtatgcttgggcgttagttctatttgattatggggcatgactaattgaatgcagtgggtggatgaggatgagcaggatgaggctggcgaggatgactacgccaacaacttcggcggtttcggtggtgagggtggtggtgaccccagtgccggtgccggtggcctaggcaacatcgacttctccaagcttggcggtatgcccggcatgggtggcatgggtggtggtatgcccgacctcagcgctctggctggtggtatgggcggtatgcctggtatgggcggcttgtccggtggtgagggtgccgaggaagatgatgtaagactgctcgcctataagtgatctgtgattgtctactaacgcaactctacaggatgatctccccgagctcgaagaggccgaaggccagaagtccaccaagatccaggaggtttcttaaacgtgaaatgtctactttctgcgaaatctatgacgatcagaaacgaaaaatgagagtgcgttaagacgcctacgggatgatagtttgaattatggatttgcttgggttttcgccgtctattgactgcagggctattctgaccaagcagctttgatccaaggccaacctttatacatggtagatctatctcattgaaaacatcccaatgattgatgaagcgtgatgagtggtcattacaagttttcacgtaagttatataatcgagtaattttacgcccacggtacaattgtatattgtaatgatcaacaggttgttaggcagtatagttttggtggatgttagtcttcaaacgatagcgacgaaatattcacatatgaaatgggctctgtttaggcattctccaggatattttacactacaatcgatgcatttacttatgtacatcatagcttgtttcatctcttctttagggttctgtgggagacgaaagtcatatatacggcaatagagaagttcaagccgaaaaattctccagatagaaattgcttcaatgtacccttctttccctgccgtactgatattcgcatacacgagggctatattgtgggtgtcgagggcaaatcggagtgggtatatgacgcatgtcgttgtgaagaacattctcaagactcaacaccgtacatcccaataatagaatagtgagaagatagtgaatctctagtaaaaacactctatataagtgtcttcatagataatcccagcccgcttttatatttcgagtcgcaccgtagacacgcggagtaaaaggcccgcaccatcattggttaaccaaaaattaccgtcacactctcacacccctcgttttcgagaacatttcactctgcaacaaccctggcatttctgcccgccactcgatatcttttctttcagaatctccctgtcattctttcgggtttcatcagcgtcttttctttgccaccttgtcacccattaaggcgcaccctggacaggcgcattttcacatttttactctcccccaaacccgcgacgtcacgtccgcccaatcgccgccatgcctcccaagaaagtcgatcagcctaagaagaagaaggccaccgttgaggataagtcctttggcatgaagaatgtgcgtcatacccttgattgaagtcgaagagcgggttcgctcgtgatataccaacatgtcctaacattgaatgcagaaaaaaggtggtgccgccaagaaacagatccaacagttgcaagcacaagccgcaagcaacaaaaacttagacgaaaagaagaaggccgccgaaaaagagaggcgtgaggccgagaaggccgccgaggagcgggccaagagagagaacctcgagctgttcaagcccgttcaggtccagaaggttgccttcggtgttgacccgaagactgttctctgtatcttcttcaagcagggtcactgcgagaagggccgaaagtgcaaattctcacacgaccccaatgtcgagcgcaaggcagccaagaaggatttgtacaccgacacccgtgacgagaaggccgacgaggaagagaagaagcaaaaggatactatggacgactgggacgaggagaagctacgtagtgtcgttatgagcaaacatggcaacccgcgcacaaccaccgacaaggtgtgcaaattcttcatcgaagcagtggaaaaccagaagtacggttggttctggacttgcccgaacggaggaaacaagtgcatgtacaagcacagcttgccaccagggtatgttttttctccacttatgtgtgcctcctacacaatactaacagcgtgagtagattcattctgaagaccagagagcagagagccgccgagaaggccctcagggacaaatcgcctttgcacactctcaccctagaggactggctggattccgagcgtcacaagctgacgggcacgctgacacccgtcaaccaggagaccttcgccaagtggaagaaggagcgtatggacaagaagctcgccgaggcacaagcacagcaggccaaggaggctactggtcgtacgctcttcgagagtggcaactgggccgacgaggatagtgagcccgaagagggcgaggacgaggatggaacctggaatttgtcagtcatgcgacgagagaccgagaggctgcgtgaacagaaggaagaggaacgtcttcttaagctcagtggcggggttctacctacaagtatacccacaactatacccgaagatgtcacacctgaagctgtgggttgagtccctccacatcctcacgatactagattcgtgggctcttgaggatccttctcccccggccacatgcaaccgtagagtttgtttcgtgttgccatggggtcggatctcgatgtcgagtgatcgctacaatcgcttgcccaaactgctggctttgtatgcaacctcggtcatcactaagggctcggctagtcgcctgttccttccaacctctatacgtatgtactacaaatgtcatgcgtagaggaaaaggtctaggctggctagccacgggggcacagaggcttgatgggtcttgtgtcccatgtgacggaagaatcaacggccgatatacctttgatagcacattgttattttgttggtagaaaaaagttcgtccattcaaatgaacatgatgccttttatttttctatgtatcagattgcacagcatggtaagatctaatgatccaagagatatgtacaacatgctctctataaacaacgcatgcgctcgttaaatgtcagcaaatagttttacagcgaggcttttgcctgcagtagcctcttctcgagcatcacggctacaatgtcctccgcaataccacgggacagctcaaacccgcgaccaccagcaccatacccatgaacgacatatcgatcatcagcgagcttctctgcctcgatgcgcagaccgccctcacgagccggccgccgaccgacaatatcgcgaatcacatcaaactggccgccgctctcaggtgtgaaagggaaccacttgcttgcgttgtcgaggagtcggtgtctggtttccagtgatgggttcgggtcccagttattcggctccttcgtgcctccgatgatggttccgccttcgagaggacgcgggatacagaaggaccacgagccatccgtattctgtcgagtaatggtcttagagacagggttacggacaagacaggtttgacctagagaacatgtcaatccacggattcagaacgtacacgttcaagcgcattccagacacaaccaacaccatcaccatcaccccatagacacatacctctgataataaacgacttcgggtcctcaaacccagttcccgagcagttcaccacggtcttcacatttcccgccatactaaacgcttccttcaaattggcgagcgtataccgcctcgcctcaccccccttaagaatgaacttgcgcaacaaatgcgcacagtagacaggcgagttgatcacatacgtcccatacttcacaccccacaccactccagccggcacctcttctttccctagaagttggaacttatccaggtgcgaatagacattgcgcacactcagctgatccagatactcgggtggcggcgcctcgaggtgctcaacgccgtcgaggaactggatgcctgcgccgggctcatcggccgcagttcgcttaagccactcatacgtgcgctgcgcttggttcgcttccttgagggcctgtggcgaggagccaggcaccgggcggtaatgggctcctgcccatggcgaggcgtagttgacggaagtttccgatgggaagtcccgggctacgagaaggatggattgcgccggagtgagatattgttggatgcatagtgcggtggaaaggccaattacgcccgctctggttgagtttgtcagctgattgttgtgtcttgtgatcttttttcctttttcgctttcggagcggattggctcgagggtattatatgtgcactgacccgatcactacaattgtgtccttggacatgttggatgttggaaacctgtcaccagggattaacagccactttataggcacaattatagacgtgaagccccaatgttggtctgggaatgagtcaagaaagggtccggggaaggcgataagacccccgcggtcatatgataaagacacatggcatgttccacttggaatgcaacatgagtatacaacatggttggattcttattagtgatgaagacctctctgtatatccctagagttggcgacgttggatagttatactctcttaatccaacagtaggtgcacctatttttctacttggcccacattctatgtacggggtatgtacggagtatactccgtagtaaggcttcttttgtgactcgtattattgcaaggatcggatttgatccagtacaccccgtacgacatggaaattctttctttcattgcccaagctcgattgaaaactctaccggtgtgcccccgataccctgatacatactatcacagggcccaagctctaggatgttcgacggtgcctttttgtgcagggatgactgcatatctctgcatttctgtcacatcacaggaaccaagcagaaccactctggagtactccacactctatacataagcctcgtggaaaagggaaaaagataagacctcggaaacactatccccaacatgaaacttctgaacaatctattctccgaattccagacaagacgagggctgctatagggcggtatagccaggttagcccaatccctacttgattgcagaccgtcgtggaatggctggatgagtgcaggcattggctgaggggtggtcgtgtaggcgccgagggatcagcagtgatggacggtgattggccgagggaggtgacgaagctgcagctcgagaacaattgcaattccaatcacatctctgtctcggatcacattattattattattttctttctcttttacgtctcgctaagtttctattctttgaaaattgggcggttccttgcagttgggaaaagatcaagttggtcaagtcggtattagggttatctatacttcaactatataaaagtactagtagacggttggattacctccgagtgatcgacgtgcaggacactaaacatagtgcaagggccagggattctctttcttcaagacgcccgtgattcgggaacttgtctgcattgatctaagcagggttaactttttttctttgctcggcttctgcatgctcgttggtgcaagtcccgcaggacaacccagccaccaagaaggctcgatctcactgtctccgctaataatgtgttggatatggtgcctttaatgtcgggtcctgctccggtccctctgtaactgcagaaacgggacagatgtatggtccagttaggaaatgaaagcgcccagcaattcccccgagcgccaaccattacttagtagtccccgtattttcattttgatcgactatcgatgctcccctcttttttgggattgttctatttaccctacgggcagcccgcttatatgtccttagtctattatatagaaccaggcttgcatcctgtcacaaacttaagccccccccgtcacgctatgtgatgagaacgtgcaagcgagtcgattcaattttctagtgcttcaagtgtcacacttgaatatccattttctcttttttattctttcccctcccctgttgcaacggcttgcgtcctttttcttcccctcgccttctcgcatatttcttacatatcctgcgtctcgcccttctcatttatagggccctttcgagcctatttcatttcagtcacattctattccttgtcaggcgctaattctaccccgaacccaaatgcgccgtgagatatcctgaaaatccccttctttcaccttgaccggtactcagggtcgtggccgattagaaacctacctggcttaaacagagaggttagtggcccaatctcgtttagactcattcatcttccctcttgttctggtatatatcatttgggacttttgtcttgaacaagtccccttctagtaaatcaatttccccgcaaattgtctcatatgcatccaatataatggttgagttgacatggaataggagcttgggggcagaatcacgaccttcaaggacagtcaaagcaatggcacctgcaccgccagctgtcaagcctcgcttcgtcgcctgcacctcaacggcgtccttattcctctatgcccagggttcaacaatcctatgtttgcatcatgatacattggcaatcgagcgacgttttcagagccaccaggagaacatcgagtttatatcggtggataatgtcagcgagcgaggtgctggaagattggtcgtcagttacgatgtagggcagacggcgattgtctgggatatcttcaccggaacggagattgcacgctttgcttccttcgatcatctgcaaatggcatcgtggatgcgtaatggcaatcttgcattcggtgagcatcatcatttatatgttatatggactccgagttgctgattaaatagcaggaaatagcaagggcgaggtgatcctcttcgaacctcctacttcagagcacatctctgcgcgcaccattttcgacccaatcacagcccttgcgcccgccatggattgtcgtacttatgcaattgggtatgtcagatgaatatgatcgagagtaacacttagctaataagtttcagatatcagaatggttctatattgatcgcgactttacttcctcaatttaccgttgttcacacgctgactactgctcgtgaaccatcaccaattatttccttggcttggcatgcatcttcatcgaaacagaagtcagatatgctggcaacgcagtcgtcgaatggcgatctacgagtttggagtgtggcaaaaccaccagggaaagaggcacctcgagtgattagggttttgaaacgatctgattcaaactcttctgatcccaaatggatgggctggtcaaagaacggaagacttgtgcaatatctggaagggtatgcaaggccctaagaaaatgattgagattgtactgacatgtgattatagagaaacatggtcttgggatgttcgaacaaaacatgttacctacgatccaattcctacaatcgatggtgtgcgaggcatcgcaaactatggtcctactgcgactctattcaccatcggcccccagcactccgtccagcagtatgatttggaaaatccggcaatggttgcaaatgtgcaacatcttccagtcattccccggccaggcacagcggaaggcagtcgatcacaaacgatgtccccacggcgcttgcaagacgctcctgatatccgagagccatcaggtgcggctaggcgaacgccatttgatgcaaacagcattgagagcctcagacagagggctgatctgactagccctgcttcatctcgcagtcggacggaatcggtgagctcaaaggcatcctctgggaagtataatgtgaggcctttctctccgccgagtcgttctggtcagagcgctacaactttttccatgacatcgactgatcgtgatacaccacaaccttctgcttcattcgcatatccctcctcagtctcaatgtcctcggtgagaagctcgagggcggcatcacgattgcggaatgaggttcatctcagccctgctgacaagaacattgtggatttattcccgttcactcgggcccgcttgattgacgtgccttataaacagcagccgcctatcgacgagacgaatctcacttcagatgatcttcggctccaaatgttgagcgtggtgtttggctgggatggagacatccaagatctgataatagacgagtgtatgtattgccctgtatcttccatcttggaaatagctgttgacagtccttagtgagccgccacgccgtgggtagtcagagtgctattctcttgacccaatggcttggcaagaacgatacagatgaaatggccgcgatgattagctctgggcaggtaacatcgtccgactggatgattcttgccttgagtcaaatgagcggccaagcgcaggcaaacaaggtcggacaggcatttgtacagaagctgcttgagatcggggacatacacacctcggcggcgatcttgcttggtctaggggacagcaacgacgccattgaggtttacgtttctcgcaatcactttatggaagctatcctcatgacatgtctcctgttcccatcggactggcagcgccagtcatacctcgttcgccgatggggagaacatgtcgttgctcactcccagcaacaactcgccattcgctgtttcatgtgtacgggagtggaaccatcagagccgtgggcatctccatctgcccaacaaacttcatcttttgcagagatgatttgcggcaagccttctgtcgcctcgcccgaaccttcgccggccaatatagtgccaccacccgtccggccaagatctacatctaactccaaaccttcactgaaaacaccagccctgaagctaattacttcatttgacgcgcagccagggcgtttccgcttccctggcttaaagtctgatgatcgtacgccaacaaatgcacctggaatcactccaattgctgaatctgctgttcccgagtcggcaatgtctcctggtggatttggctcttatagactgaacaatatccaaagcctgaatcacgcaatgacttctcgatcaaacactcctgctgccaatcggcgtcgtctgccatcgataggagagacaccagtggatgtgcacccgccaagcttctcacggtcaaactcttacagccagaacgagtatagctctacctccgaaaacgaaatgagtggacatgagcagagcaaggacaacaacagtggtctactcactttgtcagccacgaaatacaaccccggtctagactctatcaagcccagtcctcagactgctgtgcagggaacagagaagtttgccgcaatcaaggggcttccatcgccagctgctggtgtattcgaggctcttacaagtgaagaccaccgtaacgggtcccgagatcgaaaaccagatggccttcaaatcgagacattggaaggtgaaataaacccgcaggaccgctccgatttgatccccagcgctaaaagcaccgcttcgacattgaatagctacgcttcggccaggagcccaagtgttagtggccgtagtattgatcaatacatcagtagccttgatgaagcgaactatcatgccaggaagttgcgcccacatactccgggccgtggaagacgtaacccagacgacactgccagccagagctcaaaagtcaatcaaccacgtgagggctctcgagatacccgcggtaagagtgagcgtcggtacattcaacccgccaagcgctctccttcctcgccggtgcccatgtctccggaagagttggctcgataccacaccgaagagtctgaaaagcgagctgaaacaaagtcaaagtctcgcgccagaagttctagcaaggtgagagggccaggttctcgaaaccgtcagcgctcctcaagtcggcacactgctagccggctgggtacagacaaacgaggccgcagcaatgaccgacaaggatccggcgttcgatcaccgtcgtcgcctcttcctatggcgtatcccacagaggaaccttctcaggatgtcgataatcctttgagacttgttgaggataaccaaaagagactgcgatctcgccaccgaagtgctagtcgacgtcgcgccgataaaggaacagcttccaaaagagatggctctccagagaccagacataaaacatcgcaaagtctttctgtgatccaaacaggttctactacatcagatccctgggcgcagcaggaatctgttccggagcagttgagcagcaaggtttttggtcaacaagacacatccaatgggtcttctaataggaaaccaagctcgacagccaatgatttccaagacattgcgtccccaaggacaccattcgtcaccctcgcagagaaaaagcgaagagagattgccgctgctgaattggaagcacgaagattatcactcgcccgcaacccgtcagcaccaaatatacccttcccgggcgagctgcaaagcgcaaaaagtccccttgagggctcccctccgttctctggtacaggttcatacttccaacgggctccatcgcggaacaaggcttcccagaacaaagcatcacttgactatcccagcagttctgactcgaactcttcacgctctggaatgcccggcgggcttccggcaactcctcgagccatgcggcatccaaagtacggaggaagcggacaacacgaagaccgacctccttctgtgcctcttattcctacagacaacagtttcttcctcagcaatgcccggtatcaaggagatgtcgaaagaatcggaagatcgatgtccgtccccgtgccagaaggacagtacaacgccccttcaatgccgaacgacctccccacgcatcctcgatttaacccagctctcccccgaagccggtccagcagccgcagccgcgcaaagggccataaccgcaccagctcaggcagctatatctccagcacctccccccacgttcaagtgagcatcgaagagaccatcgagcatgcaatgcagcgaggaccttcagcacaatatgagacaatcccgcctccaccaccccctcccatcctcccggaactgcagcatctcaacaccccacctccaccacccccgttcccactctctgcaacgcccatctcgccccgcgagtcctccgcgactatcgacattgccatcgataacaaccaagacctcggtcgtctcctccctcgcgccatgaccgccgccccggctatcaatgtaggcgaccaaggggctgactcccatcagccgggtagtccgcgtacgtcctttgaccaccgccgaaaccgtagctcaaacgagagcttcacgaacaagctgcgtagcttgactcgtatgcgcaacagcagtcgcagtgttgagccttacatgcaggcgcatgaggcggagatggagagtctgaatgctgggccgaactcgaactatgttctgtcgagtcagagctatgtcgcgccgggcccgaactatgtttaggcagttaaggcttggctggctgacgagaagtgttttgtttgctttatatatcttttgctggtctttgttcttattcttctctcctctcttttgcatcatgagcccccttttttgattgttttttttatcatgaaattgcaatgtcctggatttcaacgtatcacgcatgtttttcaatgtcattggctttggtttgacattatctccgttcacgggctcataccctctctcgtcctgattgattgatattttccaagttatatgacccaatttatattccaaataccatatcctgtcatcaaccccaatcctagggctgattgaatgcacaatttcctagtcactgatttcagattttctttttcaagattgcagacagcgatgtctttaaagatcttgtttccattggtttttgctctcttggtcggggtctccctagctaaacggatatgcctgcaaaggcttaatgataatggtctcaattgtttctagatgatttgatatagaagtagctgttcagaggctaaaaattacacacttgtacatgcaaagatcgacagaaaaaaggcccgaggcatccccaagatcaccaaccgcggtttcgagatgatccatcattgccaatgttcctttccgcatcaatcatgcgatcaaactctgcctgtgcttgatccctctcagtcttctgagtggagtcatacttttcttggtcactctggccaaacccagcagagagagggttcggtgaaggctgtgacacgggctgctgtcgaggctggggtcgtgctccggcattctgtcgtctgatccggtcccaggcactgccagtactcggtgacccatcaatgtttgtattccggtattctgcagcggtagggctagcatcgtcctcctccaggatatccaaagctgattttgattcgggttgagtgcctctgccgcgtgcccagattgcaccaccattcgaacccgattgagacaactccgacgaaggggattgagagctcgcctgggtatcattggtgttcatgtattcagagtaagaattcgcctgcgcgggagcatcgtaagacgcctgctccggttcgtacacatcgtcgcctgcatacccaccaggcatgctgatggcctgtcgcacctgggagccaatgtctttctcgccactgcggatgctgcggacacgctcgctagcggcctggatcttacgcttgcgcacgtcctcgggtttcgccctgcgtacgtcctcgacgaaccgcttcaatcgcgggtccgtcaacattcgcatggcatcttgggaaaccgcgtaagcgctcgatgccatacttccaagactaacaataaagaccagtttgaataccgctgtgctgatgttgcctcttaaggcattatcggcccacatgttacgcaccgtattcaatagtgaggctggggtgggattgctcggaaacagtggcgacttgcgtgcttggttgaggaggtatgctgttccgatgaatgagcttacgggtatacccctccgcgactggtacaggcatcgcgttgagtgctcaaccattgcatcgaattcgtcttgggtcggggatcgtgctgtcagcacgtagtggttctccactcgctcgttcactgtgtttgagacctttcgcgtccaggctgctgtgccgaaaaatccaaagtacaatgtgaaaagatcaggcctcacaattgtgtctggccggagtttgaccttgctatatttcgcgatcgcggggttgtggccaggaagggatcgggaggagtcgttcggagaagtgttgttataattctggcctgcctgcggcgaggcgttatcggagctcatggtgagtatccgagtgttgaggaaggttgaggtgagaggtgacagcttcgaaggttggctgggccgtttactgtgacgttacgcgctgacttagcatttgcataaaatctacataactatccagccgtatacaatttgaagtaaatcctcaatttgaatcccagtcattcgataaaaatgcaatatcagtgcataagcatgtgctgatgtcgtattcttactatccttgttataaattctgttgttctgggtttactggtcgggttcaatgccttataagaacccagaaagcctccgcgaaacctcctaccacttctcaatataaggtcgcaagtccaactcaaacgcaaatgtcgtgcgtggctgagtatgcaaataccaatatgagtccgcaatctataactagtgagtttcagacacaaagcaaccaattaagtcaaacttacagcgtcggggcttattttcgcatcctcatgctcaaatacccaggccttggtacgagggatatcaatgataccatcaataacagtatgagagacatgtataccctgcggcccaaactcacgagcaagtgactgcgccaacgcacgcagtgcaaacttgctcgaagcaaaagcagcaaacttagccgatcccttaagactggcagtagctcccgtgaagatcagtgtgggcggatactccgacgattcacgagcttgcaggagcagcggaagagcccgctgggcaaagttaaaggcgcccagtctgatatcggaatcacagtgtcagcatggtccctaggaacaattcggactatatcaagcttggaatgaagcagatagagtgtgtgagcataagagaaagcaaatacgtacgcctgtgacctgagtgcagtcgtgtaatcttcttctgttagctcaaggaatggcttgaccacgaagccgccacctggattgaaaacagcagcagctacctttgaggaagggtactgcgcttgaatcttgtcaaatgcggcattgacactcttcgagtcggagacatcggtactgatgccgatggcctggccgccgctggaattgatttcttgaacgactgggtcgtaattttctgagtttcgagccagaactacaacagagtatgactttgcaaatttcctggcgattgaggcgccctgttctttcatcagccaatcctgccttatatggacagagtagatgtagaccgtaccgtgccagggccaacgccggcaatgatcgcgagtgctttggaagccatatttgattgagtaaagttatctatgaatatgaatgtttgcaagtctgggttaaatgagagaatttaaacaactaaataatggtgaaccttagatatcaccgcttagaaatgcagcggggattgatcatcacatccgcaaatgatatcatctgcagagaatgggactggtgtatccccgcaaagataacatccaaggggaaattaggccattggccgatgaataatcctggatatgagctcattttaaggtctagctagacagcctcttggggagactaagattgttggcgaaataattccaaggttggtatagttcgagatgtcggcctcaggcgcttatcgataagacaaataaatttcccatcgaatctccgactctacaactctcaactccgcatcagacaactaagatggcggattcagatcccttactgagtgatctctgctcaatatggtatgcttatgtgcatttaaattctggtacaccttgcatctaacctgtgtccgtacagccataccaatcctcccaagtaccgctgtccacgctgctcaacacgcacctgctctctaccctgcacacgtcgccacaaactctggtcgcaatgttccggcgtgcgcgatccagccgcatacttaaagcgccaagaactaaacactccatctgcgttcgatcgcgattttaatttcatcacgagtatcgagcgcactctcgagcgcgcggagagagaagttgataaccgcgggattgatcttgcgggtggtgcccaggccgacgatgataattccgaaggttcccaacatccgactactggccgtaaaaggaagcacccgaaccagggccttgccaagggtgaggctgcgttcttacgcggtgccgaaactgctggtgtaaaagttcttcgagctccaaagggaatgtcgaggaataagcagaatgggtcgcgtttgcatcccaagtgagttgggaatctctcatatcttttgattcggaatttgtactgacgtatgtgtttctcaaggcacaagcgtcttgcttggaccatagagtggattacgtctgatgggctgaagactattcgtgattctgtcatcgatacatgctctgttgctgaagcctataaccgttgttgcccacgtccgaaggatcaagagccagctaccaagccagtgaaggaagagaagaaagatttggacacccataatacaactatcgctgcacccggtgatcctgtcacgacagtggttgaagaggcagatacaaaacaaccatcatccccaaacaaagactcaacaaaagaaccagctgatgactcaactgagcaaacggataaagtaccaaatcagaccatcaccccccaccgcggtctctacttctaccttcaccgtccgcgaaccacaaccaaaaagcctgtcttagctcctctcttgcaatcctcgacactcaatgctgttctgcgcaatcggacagttctagaattccctacgatttatgcactgctagagtcagcagagacattgttttcagacaaagataactctaaattcatatctgaagaagagtatcttcgcactgctggaccagatgagataggccagtcttctaccgcgagtgacgatgacggtgcggctggaaacaaagtactcgccagttcttcggtgaatcttcaagatgttgatgagaacctggtactggaggtattgaagaaagatctatttgaaccagtctcggaaactgagccagtatgagttattccggcatgaagagagatatcagaagacgttagccaatttggcacatctaccagacaatgtacgatacatagggacagctaattatcagtcaattgtacaattgtacaacgggtcacctctcagaaaaattatcaggcttagatgcagacgtattttcctgaaaaccacagatcctgctgatcgtgacatctcgaccaaaagaggaaaccacgatcagcgcggcttctgtcgagtcaaagattcttcgagttcaccttcactccacccgggaccaccttgggaatatcaaatgctccaggatcatcatgaaaactaacgttttgtccttcgggatcaccgtgatttatctcggcacggtagcatcagccttattagttgccagaccaccgtcgcagttaccagccaagaaacgtccacagggatgcgattgctacacaatatccgggcctgatccgggatattttcagcactacaaggtctgggactttcgggcagtggatttgaagaaacatgccaatctcaatctgtcgaagcccattgattatgacgacgaggactgggacgatgacgctgaggccgagggccaagaaccgcaaaatggccgtctctcgcccggagtccataatgagaaagacccggaccccagatcgctgttgttctacaaaacctcattcgagaaagactggagcagtcaaaactgggaacgtcgaggcacccccatagccccagtcctcatgataaattcaaagcacaacgtcttcctcacccgggactcggaccagaataatcctcacgcgacgtatctcgtcctgcgtaccactcgtttttcagaatacacctccaccgcggaaatcgagactcgcatacgcaatatctaccggtgctcgctgcgtgtccggctgcgattattgccagccggctccgtcgtatcgcaacctcctcagcataaagaatggccaccgcgggatccacaacggcatcccaccgtgcccttgaacaagacgattccgctccgtgatagcagaccacctgatggcgcttgtgctggcatcttcacctaccatgattcgacctgtgaatctgacattgagattttgacgcgagacccgtcacatcgcgtgcattatgccaatcagcccgattatgattttgccgctgatcacgagattcccaatgcgagtaccattgccgatatacctgtcccatggacaacatggtccacgcatcgcctagactggctctcggacatgtcacggtggtatgtcaacaatcagatacaggatgccaaatcgtacagagttcccgagttagagagcatgattgtactcaatctttggagtgacggcggactctggacgggcgacatgagaattggcgacagtatatacatgggcattgaatacatcgagctggtttacaaccgttcttctgatgctttcagggccccttatgtgtctccttcgcaaaaccaggcccctcccacgaatggttcttttggcaatgggaatccattggagccggatagaaaggacgaaaagtgcaagccaggtaggcagggccgcgagtgcagaagaaagaagtggaggaacaggcctcttcatgaatcctgtcgaagaccatgtaacattgatcaactctaggacttcccaggcagactgtttgtattattatcggttttattcaatattttacttttagattcctggtttcgactggcttgcttgttctgtcctctagtttagacaagatgaatgttttctcagagaaaatagatgtcaacctaatatgcttcagggctccagagcccaactttactatttggatactcattgcttgtgtttagtcctgatatcggattgaagagcaaaacactaacataatagaaatacatagactctacaataagaaaggagatgctattcaggatgaagaaaacctcccaagggaagatagaagaacaaggaaaacaaagaaatacgaccaaaccagttcacgaggaagggactgctttgtatcaactgagtcaccaatggtggtgaccgtggggtatcattcattgcaaacatcacatagaaagagcgcgccaaaagaaaattcattatccttttctcatcttccccgtgttgttcgccttgcgcgccagaatatcaaataatgtgtaatgatgaccgaaaacgccttgatgagggtgcttgatatggataaatgtgggtgggggatggatgaggtatgtgagattatgtaggagggtgaaaacttcaatgcatgagatcgacgagagagtgcgatgcttctgtagccatagacaaactggtctttggtgttcatttagagcaacactgcacctgttgctttgtctcgtgggttaaactcgccgtgaagaccaccgttcatgagttcagcaacaatctttctgcgaagaagtgtgatgtggcctgggccaatggcagtcggctcaaccccaacagtaattgctttggcgttggttaggaggaagacaccacagtcacttccgttatcttgctgagaagagaccgacggtaggacggtccactcctcatctttgtattttggcccaagctccccacgaagccattgcttgacgttttttacctgccgttgaccgcgggatcccagagagtcgaaatactctattgtacggtctgctggtcgaataaccatgagagtccaatgacttgactcatgtacagggatgaagactgtgtcgacattaagcagtccttggccaccgatcttggcccgagttgcccatcgtttcacgccctcataccccttatcacgaagggtggagtagaaaaatgtgttgaaagtgtgaaagagcggccgatcgctgggtccgaggttcccatgcgattgacggagataatgtacgagtaaaccaaggtaggcattgatgatttcgtcattgagccaggcctcaggccgaatgcaagtgatgatatcccgctggtacaaattacctcctgctaatgatgtggcgacggcttgtccttgtccactctgcacggcgcattgaagtttggtaagccactcgggcgagatcagacgtacgggttgaccctggggtatcactctgatcggacgttggagatcgcgctcccgctctaatctttctttctcccgcctctcgaattccgcctcgtaccaagatgcaatgcgattggcaggaatcggcctcctgttggcataaaacaactgtacagcggaaacagggccatgcggaactcttgcatcttgttgagcttgttgatcccacgggtcatcaatatccataagatcatcttggacgggcttgggggcttcagttggtctcggcgatggaatgcgcctagcgctcggaggaggagggatatatggcggtaatctagggtggagatgtatgccgagatccgtaacaagtgctggtgctgcgcgagcatctatgtccataaattcccatcccttcggtgggatatcttcctcctcgatagtcgcgccttgtgatacaacaagtgtaggtgattcgggaggagttaacgggaaggctcctgggatgggcaagtgagagttatccaaggctaggctatagtttagtatatgcgacatttatctccaagtagaggccaccataccatcgcgggcgttaattgaaggctttagggcctcgaagggattgggaatcttgagagagggctccgtgtgctccgtgagctccgtgggctttgcaggggagacgcgccgcctgcatcgaggccagcggaagaaacccatgttgctgcgaactctgaagtcacctcgaacgacgggagtaagaaagatctactcgtccggtgacgcgctttcgagtaggttggcagttgaacgaacgttgagggcgtgaaaagggaggaatgagcgggtagatgaagacgaggcttcaagatccatcattgggcatgactggaatatctatcccaaacccaaaatcgaaggcaaatactccgcaaaggaagaggtatgggaacattatgagccgacgcgatgcaccgggttctttcatcattctgctgactcagcgcatattccgcggcccagcctccattgttgcgttgatcacttcagtactctttgatagctgtttatagagtctgccacaggaattattagatgaaacatcaaagcaacatgagactagggagaagaaggaacgatatttagcagaagttgaaggataacattcaaaggaactcctacaaaaacgatatacaaacaaagagagacaatatgtacggagcactactccgtacacaactcttcacttgaacgccctttgttctttgcctctaaagatcttatatgtcgtggttcatgcggctagtctcatacctgtatttgagcaggatgtttgactagaccgaacaacaactatgaatattgctttcaatgcgtatgtacatggataacgtaaaggatacttaaggtgacctgttccagcacagcctgctgagctaggagcaggccgaggagttagtggaggtaagggaagagggactgcaaggcgaattgcacttttatcaatacatttctcatcctcgttatcgggttccaagtccgattaggtcgaataacaggggtgcgacttcaatgaccacccatggaatacctaatgaggactgatatcagcaaaggttctgtcaaaatacaggggtttcacatacccgcatatacaactagttttgtcactacctccacatcgtaccgcacgcggggcttcttgatctgggagaagacttcttgttcatcccgctccccagcctggatgtctagcgaggggaaaggtgttgttggaatgtcaaaattcacattagctgccgatgacatagggctacctcttcccatcatgtcttcataatcgtccagtgatgccgtctttcttggccgcacgggtgttccattgagcttgttttgatcctctgcgaccggagagggatgattgctcccagattgactctggcgtcggcgtttctcccggtacgccagggtctcatacgcatcggcttctgactgaggaccaattgaaatggctcggcggcggggatggcgcatcgtggtaaggatgtctgggatgtcagaaaagttcggaaaaacatcatgatcctttaggttatagggaacggtggtgtatttcctaggaataggtcagcataatgtccactggcgggaagtacagtcgaattcgaacttacgatgcagtagtgaagaaacgtcgagggagcaaaagcccgagcttctccagagtgcggaagataggtggcagaatgcgcagcagagcaggctttgttgcaattctccaagcaaacacacacaagacgcccatgaaaagacgaatgacagtcttaatccaacccactgtcgccagatcgtagggaattgatccagacggataacccacccagatatcggcgaagtgccatgaagacacatccacgcctagcatgacacctgcaaatgcaacactatcgtcgaagcatgggcaatcatctgccggctccgggtggatgcggacgagaaatatgatgagaagtcccagcaaggaaatttccttcggcgaggcggacaaaatgaattcctcaaaggcaggtccgtaatgaaactgtatgagcccgatggcggcacccatagcacaaccaacaacacagtcgagcatcccatgcattccgcaatacagtcgacccaatacaatagacacgacatagacgtaggtgacggcttggagtaagagggtgacctgcgtgccgagagttgaatcgggtgaaccaagcaaggctaaagcataaactgcaaccgaaacagcgttggtggaatgtgtcgatgggaaaccatattccagggctgcagaaccggacatggtgattcgctggagtggcggggacagagggcgaggaagacagagtaggtctttgaggaagccgctccaaaagacgcctgatgctaagatgtgtactaatctgtagacgatcactatcagccacagactcccacttgcgcttccaatttcagaaagataacgtacccgcgacccatactgggagagccacaccagaataggaagggtaagaagaccatgaagaacgtgtgggtgccgaggttggccgtgaatgcgaaatacgagtcgagagtgggcgtgcggactttctcctgtacccaagccaaatatggcgtctcataccggatcaatgggatgagcttttgtcgcggccaataccgccagaggggcagtcggttcgaatctatgtggcagacgtgcgagggttaggacatcgcgataagccacaggtggatgaaaatggaaccaatcgcatacagtgattcagactcttcagcccagcatcgggctggtctttcttgctcgtgcccatgatgcagtgttatcgattcagacaatgtcgcaatcgaatggattccatggaatggacaggccgctgcctgccagtccgtttgaaaggttgagggatatagggatcagaacataaggagcgaattgaagttggatcgaagaaaatgatataatcgagaaactcgaggttggatcctccaaagtggacggggagatcatccgcggctcaaacccctgatgcccatgtgtgtgcttagtcattttgcattggggctggcccgggggatgctctaacggagtatatacggagtccgaggcatcgatttttactaatttgtatttgatgttgggatagagtctctcagctgtagacctatattctgtacagagtacggagtacgaagtagagggtggaatacatatttatgtcggatatatgttttgcaatgtatacctatctggatcgtccttgaggtcgaatacatgtcaaatcgttctgatttagattttgaatgactatgttgtatgcactttgctattttcaactggtttacgaactattttgttcattacctggtgatgctactccgtacatactagttatgtggctcttagcttgtgctgtgaggatcctcttgcctctccaagtttgatatactctgattgacatctcctcggagagagcgagataaagccaagaaatataatgtaataataatagtatataaagtcaactctcgtaccttggaggctgtttagcgcgggacgtcggtcttctccgaagatgacatgcagagttagtgagtttttagtttctattctattatatggcttcgccacaagatttccaattaaatgcttggatttacaacccttctccagatctgagcctatactagacacaatataagttataatataacttataccacgcaaggtagaagaaagagtgtgatgtttgaaatatctacaaatcacatgacttcagataaacttgtataaccacaaacttggatatgccacagctgaacagtggggaacagggaatatattagcggagtcaaacccaaaacaggatcaagataaaccagtcaatgtcagaatacaggatatagaggccttgaatcgtgggaagcggagccctggcgtcatggagggacggccgttgctatggtagcccaggggggtaaacacgggtttcacggtttcacaggtctcgccagaccctcttgctctatcgatcctctagatcatttttagatctatcttctcctctttttccctcctacatctcattccatatcatctcttccctaccagacttaacacaacgccgttttcctctgtatcacattacaaacgagggacattcccaaggtccaacccctatccctgcatcatgagtgctatgtacgaagaccaatacaatgcagcatcgcgccgtcgctctctcgttacccctcctccatctttgacaccgcgtcacagtcgtacgcgcagcgacagcatccgagtcagccacggcacggccagcaccaacaccagtgtctccagtggacggatgtccgaggcgacaaatatcactcagccgccctcattctcaaaaaagtttgtagtggtgggcgatggcggatgtggcaagacctgtctgttgatcagttattcccagggttacttcccagaggtacgttcggcctacgaggaaagatgtgtccctggtgctgatcatcatttagaaatatgtccccacggtgtttgagaactatattacccaaacgacacatcgggcttctggcaagaccgttgaattagccctctgggatactgctggacaggaggaatatgatcgtttgcgtccgctgtcctaccccgagactgatcttctatttgtctgcttcgctatcgattgccccgcatcattggagaatgttgttgacaaggtgagtcctcaaaatggaatatctttgctcgatttgtctaacatccctcctcttagtggtatcccgaggttctgcacttctgtcccaccacaccgattattctcgttggcttgaagtccgacttgcgcaataagcgcacctgcattgaactcctcaagacacaaggcctgacacccatcacaccagagcaaggcgaaaatgtcgcccaacggatgggagcaacatacgccgaatgcagtagcaaggagatgcgcggcgtggacgaggtcttcgccaaggccgttgactcggccatctcaatcgaagaacaaggctgggtagccccgcagccggctggccgtaataaccgcaacaatcgcgccagtgccgtgccttcagggggtggaggcccccgccccggcaagaagattaagaagcgcacttgcaagattctgtagattgattctactctatctgtatttccttccattctcgacatcctttgacctttttttctctcttggccggaccacaagcctggttgcttcgtcggcttgcttgcccgctcgcctgtgtatgtgacatgtcgccgcaagctggacaaagctagacatgactttccaaacccttctctgttgtatcgatacgctgcgcggcccttacaatgatctcgattctttttatttttgctggaggctgtttcttttattccacctttgttccccgcttatttcctttttttggcctttgtcatgacccttgccctcgttccatttgatgtctcttatgactcgggtcttagccgttttccattggcatgcatgggaccggtgttctcgtttgtgttatctgatatgttctgttggcgaaagcgacgtcctttgtgttactaaacaatacatttgacctattgtgtttattaatgccttccccgtatgattcgtatatatttcccccgggaatctaactggaattttgaatggtatctaagaaaagagaaagaaaaaagaaacaaaacagcccgacgccgagacccgtcatgcagaccaaaatgtaaaataaaccatcacggcatggctgtcgagtcaccctcgtcttcacgctttattcccgacttactcgcatcactctccccactgaccttccgcttcacattgccattgccagcctcctcgccttgttcttcaggccggcccatgaaattctcaaactgggaccagagagcttccacagatccaaattcattgcccacctaataataccattagtagatgctctccctgtccgggtggtgaaccttaccgcaataacactctccaaattccgattcagacggttgatgttttgaagtacttgttccataccctgcgcgaataaattagcatcggttgcggcggctgataaggtgggaagttcgtagatattggtacataccactgcgatctctcggacgagttcctcgcgctgctgctcaaagactgttggggacgcgcgaccgccagagcctggtgtctgctggagccaggccatttttttggcttctgaagactagatggcgacgaggaatggcacgacctggcacgttcacgttgtgctcaaagacgcggcggttggggtttcggggagcgtcgcggatgattccttggcgttggatgtttgactagacgcgggcttttgcagggaaatatccagttggagtcacttcacagttacagtcgcagtcacagtcgttgcagttggacaatttgagatgaggttgatgtggggcaggtttgataagagataaatatgtatggaaatggcgatctacttccatcttgtatgtgacactctaccaaatccccggactcgtctctgaaatctatatgattgaactgaacaccgattctatatttctcctggaagttttctggcgttctggtccttgaagacgtttgcattgtgctcggttcgactcgagaagaaaggcatctttccaagagagcacacatatttatgatttcttcgagcgagcctgacgaattcttattctgagaaacaacaggctaccccaggcacaaatttataaaggtagaccatatcaataattgtatgaaggcaccaaaatatttcatctatctcatcctgatagtatcacgcgatgcaaccgttgatataataccatatcctgcagcttagtggcccgcaatcaagagcaaggattatcatctttatctacttatggtaagaagaaggcttaggagtcaaaggaagtgccgtatagttacatccgagttctagacttatgcataagccacacggaggccggtgtgcatcgtcagcataacttggcatagcgtgggcagaagatgtgcttatgcttgatgcattcattccgagacttagcgccgcggcattggaaaggggtgacatggagaggcccacaagtatatagaggcgcagggcaatttgtggagactcggatacagcaagctccgtgaggttgtcaaattgaaaactccaaataaagtccgggaaggtaagaatttcatcacattcgtactgtgtgtgagtgacagttgagctgagtacgataaatgagagcttcggagagaatcagacgacaactctagtcgggaatgtcgtacgaactctaatgttcagatgtcttgagtttatatatccaaaaatataacaggcttcagcgtttaggattaggtttgaaaatcccctgaatatggtgatatataagtgtccattactgtgtgcaggccctgttaaatttggtttctaataggattagacaacacgctcaacgacacaatggttgaagtcaagtatatgggagaatatgactacataccgtcaataccagctgccgtgatattcattggcctatttgggatcttaaccctcctgcattgttggcaagtgttccgtggtcggacttggttcttcattccttttatattcggaggaatatgtaagtaccagctcaatgaaccctttccttgggccttttccggttctttctaacacaggttttctgcagttgagattgttggatatatagctgtaagccaatctcgatactcgatcaagcgaaagagggaatatgctcacagctctagcgtgtcgtttcttccaagcaatacccgaattataccattccccctcttgccatacaagccatttttatcctcgtcgcgccgtcactgctcgctgcgagtatttatatggaactcggccggatcatgattgtcactggtggagaacacttgtcaccaatccgacgttcgtggttgacgaagatctttgtggttggagacgtgatatcatttcttgttcaggcaggaggtaagacgtccctcgacgtatgtgcgaatcttgcatctcctgattgactaacgatatattccaacaatgcaggagccgggatgctcgtcaaagccagcacagcagaaaaaggcggaaatgtgattaaagtcgggttgattatccaaattatctttttcggcctcttcataatcaccagcatcattttccacgtcaagcttgtgaaaaacaggtcaagagtgctacaacagcacgaagtcccctggaaaaggcaccagaccgtgttatacatcggcagtctgctgattttcgtccgttccatcttccggtacatcgagtacaaccagggaagtagcgggacattactccagcatgaattctggagttatattttcgatgccgctcttatggtgctggtaatggccgcgtttaacgtggtgaatccggccgagattagcaggttgatggaagggagaaaaggcgaatatgggacggagctgattggatgattgagacgactgccgggaaatccccggggatattcaatcagaccgactcaacctgtattgaagtgatgtaaattataatcttgatagatcgagccagagtccatacacatgtgaggccttagtcccgaagtctgtccgacattctctgttcgttttgctacagttctcttttcaacttgaattcagatttcaatccgcaggtctctcgtatagctctacatgtacgggatttggtctagggtccggcgcagggacagaggccgaaacagtaccaagtcgcgagtcgtatcccctaacacgaagagctgttgtgctagacaagggaaaaagggaaagagctatgctagctatacgttcctaactctcagagatatttacagcaaagtgtttttattagcttaacgaatgttccactccgagggtccagagtccactggtacctatcctgtacatactacaagcctgacaggtagtgaatatgtcagagctaagaccccgccggatttaatatttgccaggtacaaagttcaagaacaaacaaccgggtcaaatagaatttcggttactgtcgcttcataggaagaattcggaccaaatgtagttatggtttatggtttatagtttactacatcggctatgcaaggtgctatggctacaagcgacagggaaaagtagtagaaaagcaaaggaaattgtaataacaagaagcgaataatagacagaagggaaaagcaaaagacaaatgtaggtctcagaccgttcgcgttcttccttagtttctatacatgtgccaaaggaccaatccagatccaaatccaaatcctagacaagatcaaatagtcaaagcagggcaaaatcctgtgcccttgtcaaccagactagtgccagcaaagcagatcaaaagcagtccgaggctaaacgcttgataacacccgaatagcaaggtaacatcgtcgcgcacatcatttcgtatcattccaattcgtaatctcatttgcaatccacagttctcggttcatgtcacagtgccccgggcacgaaacacagactcaaccccgatagtcgagtcgtgaatccgtaaaataaaatcatttgcaatttttgttttttgttttttgtttttttgctcccattctcacatggcaagaaatgttcgagtattgtccacccgagtctgaatatgtgcctgagacatatagtaaagtggaatatagtattgcaggcgggggtgtatgtgcttaagagtgccggcggggttgcgcgaggatattgctcaaccgtttccagcgcggcgtcggggatgtcgagttcctccgagacggggatttttctggttttgttgatgtttgtgtagaggaacgggctcggttgttgatggttgcttcatggtcggcgaggacatcctcaaggcggacgtcggcgtcagacatacgtcgagagtccttgggatcaaggatctcgatgaacttggagggtgtatcacgcattgtgtagagtattcttattctttgcgctgatggaggagggagaggtatgatttcaaatttcaaagtagagggaaatccagaggaggtcacgaggacgtatagttttgtgtaggttcaagcgcgagatgaaactgcagcctagagattcgagtgtttcaagttttggagagaatggaggatgaagaacagaggatagtaaagtagagaataaaatagaaaagaagggagttttttttataaaagaatggtaacggcgtccgacagccaaaaaggaaatgtgaatgtctgtaccgaagatcagtggagtcgaagtataagatttgtggactatcagagcgtgatttctttgggatatttgggatgtttcatacttatagaagaagtacacgtacaagctagtacgtaccatccatgtaggcaacatttccaccccacaagccaagtgcatacaagatacacatacttcgatgcacaagcccgtttgggcaatgtccgtttgggctgcggggcgatgatcggcagctacttggtggcgtccgagtgacgatgaaccacgatgaaccatgatggttcgtagatatatcaagaagcatttgatgcaaggggagtcgaatttggtctagggtataagaagatcaaattctctcttctgttctccttctatagacaggaactccgagactctagccacgataaccttgtgcgctactcgtcttatcttagcttactttttgtggatgccatccatcaagcgccatgacgtcgatggcatgaaatctccatcagggtttcgatgctcaaatactgtagatgggtcgatgggagatcggctcctagtatgtatgatgtacattggtcaatagaatgcatgtgcgccatgtggtacgtcgtcttctataaaaagaaccgccacagcaattagccacttcaatctgccgcgcatccgaatctcttccaacaatttctcatataatatgaggcaaatgtgccatacaacatagggaggaaaggaacgcgtcaaaagggacaagggtgtcagaacggagtatacgtaggtggattcgccccaatggagattgctcagggctgtgcccggaatgtcaaccgggccgtcgggcggactgtgcggactattcgatacacttatctctaggaaagaacgggatgtccaacagggatggcgactatattcagtccgcgaaatacgaatgagagcagtacttggagctactattttctgtcgagaaaccgatcgccccgggccatagtgtcactccttcagtgcaccggcgcacacgtacattcgaaatgtggcgatgcctattggatttactctgtggtccccctttttctcaccggtgcctctgggtgaacagcaagatgggagtaccgggagatgttgccgccataatacaccgtcatactcgttgatagtcgagcagactcgcgcagcagaacacacacccgagtgtccaacaagcctagtagactcggtacgatctggtgtcaggcgggcgtagcagacctgtggcacacaccgagtagtctactcattcaatggaacagtgagtcccactgcgccaaatacactgctccaaagcagcgaagcacacactttccgatcaaaatggtacgtttctccgaccgaagaattgtccgcggatgtaagggaatacaaatggagaaaggaagaagagaaagagatagcttttgatctggaaaaagaacaaattaggcagtaacaactgcgtggagtcaacataacataacgcttatgtcggggtaagtgaagtgtgatagtctcattctaccaggttcccgaggtcaacagtcatcaataaaaagtccttttccgttcttgaacgccataacttcagctaaaaatgtatgtagcggatcactcccagcacccctcatgtaccgcactgcatcgcatctccattccagggtatgcgacatattatttaaattccatgtccgtcatctcgattgcgttggccgagcccatccagagaatgttgttgcatctgtgggaaagaaagagagttagccaagctcgaagcgcatgtatctagcccgacgctaaaccaatggaagcgcgcatcgcatacctaatcagaaccaagcccaatgcaccagtcggctttccatcgataaactcttgtgtgtcgcgcagcaggacgttcatgtatgaatcgatgctctcgagagtgcctttgtattcggtctggccccactttaggcggatgaggacttcagtgcccacgctgtagagatatgtaggttagcaaggtgtcttaatagcaacgatgcatatgtgcgaatgtctcgaaagatatgctgcttgggctgcttggaccggggtggggcgagtcgcataccgagcctggaggaagggacgggggttaagcggttggaactgtagaatagcaagttagcaattgaactcatgggaatagcgcgcgggatcttgagcttgaaagcgggctgagcttgagggggagaatacggacactcattgtgactcgagaagagttcctggttggttgaggtggagtagtattcaggatatgatgatagcaaaagcccaatcaagatctattgcttcgttggttgatcgtgcttgtcgtgttgttaactgcgttgacatcggggtcggcgagatcgcgaaaatgtgcccaggtaagctgaacaaggcggtgatagatggccaattaccgcccgtgtctcttcaccgccctctgcataaaagtgcttgggttgacaatcgacacgatggtttttgctgcttttaggtgaatacactgcattaaatccttagagctacgagaaagcaatgaaattcatgttatggctcgttttctcatcattggtgtatctctcattttcagcatgctccgcgcccctgttcccatcacagcctccaagactaagctcccacagacaccagtaataatacaatgggaaaaaaaaagaatcggcgttcatcaaaagttcgtagatgtagacgcctataatcttcatcgccaggtagatctccgcttagcggccaacggtccaggtgatttccttgatgctgacttcttcacccttcttctcgtcgtagtcataccactcaccctccataaggtcaatgccagagaaagtagtagtggactcgatagccttagcttcccattcaccctgaattatcttcgtcagcacatgaaattacctaggtgaatctggtgaattcgggatttactcacgtcgggcttgaactcaatgaactcgaggccacggcaatcgatttcgaggatcttctgggccttttgcttttcctggacctcatagggcttaggtccgttaatgacagaggcagtgtgggttttctatgtggctgttagctgtgtgatcatggaaaagccgagaaggccagatgattcatgtcaacaaagcggagtaaaactgagagttatgagtttcgcaagaaagagggaaagaaaccatttccagctattggattggaagaaatagctcgcttaccgtgcacagtcggcacttccacacaaaattagcctcgccgcggctaccggggatctcgtgtacctcctatacatcaatccagttaataaaccattcaatcgtggcgaaatggagagcaggatgtaattaatccacgtacgaaacggttgaagctgacccagttagggtgcgtctcgtggcaggaggtacattgcactcggaaagtgtagaagtagggattttcctcagtgtcggtgggctgaagagcagtgacgctgtatcatcatatcagctttttgactctttgataacgatgtctgaaaggatctgcccgcgcgacgttcctggaattggagtgcagtgcggggagatccaggcacctgaaaaggctcaataatccagcacgtaagaaaggagcacttacccctccatctgagcttcgaccgaaagagtgagcatttttggcttgcgaagtaaatttgatcttgaggtgtgatggctgaagtcaagatcctctctgtaggtgatgcggggtggagatggaaaatacttaacgtagatcgagggcttggcatgtgaccactctgtaatgattgagcttatcaagactaaaaatatgacagaagtgttaagaggaacttggatatttgaattgtgattatattcatagaaattggaaaataaacgccaggaatgctcaagctatcgctcgcaatgagcgaaacaaaaaagcaaaaaagctatatacatctcgaaggtaagatacagacccaaaaacacgtcaacattctcacaaacggctctgttgagaatcttggccgagaggcttcgttgagaacgcattgaagaactcgttgagagcgtcaacagtgccacttccctcaaccagctgcacggtgcaagcaacgtggctgtcaggacgggtgacgacaacaccacccttctcagcatcaaagccgagcttctcgtgggctgcaaattgagcctgaggaacgcgtatatcggggatatcatcggcatagaggtggtggtggtagtcacgtaggacctgggggatggagtccatatcgatgttgttcttggagcctgcatagatcacagagagggtgaagagcttggagtgagggttatggcgctcgaagaatgacacatcggtaatatcagaccggcgatacaccgaaaggaacgagcgttctttctctaggttggctgccaggtcggcaatggccttcttagtcttgaactgattgccagcgaagatgaagatgcggaatgcaccgttagcgggcacttcctgctcaagctcgacaaagttggaatcggcaagacgggtgacagtggtcggggtgaaagcgcgacccggggtcagatgaacaccgggaatcttgaacagaggggacttggcagggtggctcacgtcccaggtgaaaatattgggccggtaggccactccgtatccactggtgaactcgcaagatgacttgaaggtcttgacgaattcgtcctcctccccaccagcacccacggtggtgtcgctggcagaaccgacctcgccggcagaaggacggcgcttggagaatagggctgcgtacttggaatcgaagttcaacaacgtctcagcgatatccttgcgttcgctctcgtaggtgctgagaatagaacggttggcaaacccactctccacggcgtggatcttccaggccatgttgagtgcgtcatggaaagcagtgttcattccctggccggccttgggcttcaggggcgttagcgatattgtgagagcaacaggggttttaacggggggtaccaacgctatgagtgtggcaagcatcgccacccatgaagactcgctcgtcaagggtatacttttcagcaataccttgtccaatggggtagacagagtaccactcaacccggtcccactcaatccagtatggcttcagaatgttcttcgcagtctgctggacctcctcaacagtggcagtctttcgggggttccaatcggcgtcggtggaggaggcgatctggacatagaggcggaccatattgtcctcgcggggaatgaccatgattgagccagcgtcggagtggatggtgcattttgtctgtatactaacgcattagaaacatagaaatacgtgacattggttcttgttaggcatgcccacctcaatgtcagggaagttggtgcgcacgacaccgtccatgacaccccaaacataggcaatgggatccttgtggtggatcttgatgcccagctgctcacggacaaagctgcgggcaccctcgccactaaacaagtacttggcgcgcacattctcgataacattcgtatccaagcacttcaggttgacttcaacagggtaatcagcgttcgcaccatcgttcttgaagccaacaatagtccatggccgctcgacagttgtgccagccttcttgatttcatccaagaacacgcgctcgatcttgccctggtgaaccagggtggtgaaagggtagcgggtatcaataaagcgggggcaactaggccagctgccagtacggccgatgccagagccgtcagctttgggatcccagaaggcaacgtcgtacaccttggcaggctcgtaagccatgatcgagcgcttcaagccaaggttgcgcaggatctcggtagatcgcggctgaataccgtcagcgcgaccagtagcggtcggcactgggcggttgtcgatatgcttcaccttgtagccccatcgtgacatacagagggacaagagcagaccgacggggccggcgcccacaatgacaatatcataattctcttgttggaccatactgatggccgaaagcaaacacggggattggatggagggcagttataaattggatggcgcacggctatgggatcagcgtaaataagtacctatggcttgaaagaaaagcagagtcgctcagaggttcaccctgcacaatgactgggggagaatgaatgagggccatggctatccctatatactgtccgagaactggcgtaagtgggcaaattgggtgttcagctgaagtaacggagaacatccacggcattgagagtcggcgaaatcgtggggagcaccggctcaagggtcagggtagccaatcaagttcaccagaaacggagttatgggcgatttgtcagaatcgcagaaacaagcgccctgtggggacaggcctgggttcccacaatgtccataataccgtcgttgatcccgagctggtagccgcagagctccagtgtgactggattgctgcgatttccctctactccacccggaaacgatctcggtaagcggacggctggacacgtgaccttcccctcggcaaccatccatatctctgaacaacagctatgatggtagtttaacctggtacttacaccacagataacccgaaattatatgccatgctctagatgaaatacccatgaggtctggcacctactctaatgttgttccctcggtctctttccatgccactcctctttcaaaaaggaaacctacattcatggatggtcataacaacagcattagatggctcaagtcttattctacaataacaccaccgtcatggttgaatggtcgttatttttttagctcaaagctaccaggtttccgacagtttaatcttgaagaatatattaacgcctaaggcaacaacgacaaaaatagattaggttgggtaaaagttgtaccgttccgaactatatccatgaactacatgtgtagaggaaaaaggacatatgaggactgaatacataatatgcatttgtgagctatgtataataagtggtactagacaattcatttaccttactatcccttatagataatatgtaatcaaatcttgggagattttgtaatatccttactattactgtagtgtgacgggtggtcacaacacataaaatgcgttatgctagtcgtgagctcacacattgttggtagttctatttatttattttgtagtgggctctcataggtgtgggtgtgtatgaatcattgtgatattgcaataggcttgtccaggtagtccaggtcaagcccccctgttatggagatgtgctctcatagcatgtcgtctttttagggttgactcacactactaggatgatgtggtaaataggcgtttgattggtcgctccattaccaacctccttgattatgaatattaaattattttcttttttgtttgatcattcattgtttattcctatgtactttctttgttccaatattctttctctatgtccattctctttgtttccattatttttgagacattgccagccaccttattgaactagtcctattgttgcagaccaatatactcttttcggccgcaaagaatgacctcggttttgatactatgctttattgggaggtcatgaataaaaattaaatagctattgtgacgagacatggtgtcgccctaggactcgacaacagcgctgcataaatatcctcttcttccaataatatttcttctttccttcccatacttcttgatattttatgcttctgtttctcgggcttctgcgttcacctttctgcaattgcaactttgacttcgaacagcaccttgacagtaactgcaacaatgtctcagtatccaccgactcgtccctgggcagctcttagcgccattgaccgagatcacgagtcgggactcttctacgaagatgatgttcctcacaccgcaaagatgactgttcacatgagtcaacctgacttcgaagaccggggccccagcatggctgaaaatcttcgtgttattgcggaacgcagtgcagctcgtcggaatggaactgctatgaacaagaacgatatgtaaggtccatccttactaacttgctgaacgtgaaatctaatatgatgaacaggttttccaagccattgccacccattcctcaacaggaagcccctcagtcggccgccacagttggtcaggagggtgttgttcaaggttctggggacaacatcgacaagatgagcattcattacgtgcttgatagatccaacatgcatggacgccacgatcaatcctcatttgctcaacgtgaagcttctcaaattgctactcaagttggccagaaagcagttgccaatggttgtgtgcactcaagtgagaagatcaaactgaatttgcttcttgatggatgcaagctggaaggatatgacgatgagactccatctattcaacccagtggatctgagccgaccctcccacccctttcgtatcactcctacaatacgcaagccacctacgcctactcctcctctgcttacggttgcttggctcaggaatatgatgctctgtatgatgctcctgcatctgagacccctggttctcaagtcaatcccagcccttatcgcaacggtgacagtcaaacttcgtggtacgaatcttcacccacttgctacgagttttctccgggtcctcagattgcattggttcccaacactaccccggtgcacgaaatcaaggaagaaaatcaattcgcagacctgggggccaccatcgatgagctgcttgccttgatcaacccggaaaaggaatactcacgccttgcgaatgacaatcacagcccagaaagttcatcttctgcttaccatttcactacccccagctcggtgtctacagatatctaccatgcggatcaatactctagccttgcttaccaggctccagacttcgtcattcgtgatgctgagagccctgcaagccccgatacccttcgtggagtaacacctgcatcgcctgcatggtccccgccatccccttgtcccaagggatgttgctattggtcttcggatgatgaagccactgcatctcctgaacctcagttcgatcgggaatggtctgcttccgatgtgtctctgcaagagtcacctatgttgccttctcttcctcatgtcgcttcatatccatcttctgagcgtcgtgccagctacctaaaatggagagaggagagagcgcacatgattagtgccgaggaggctcttgtcccacggcaattgaacgtgatgaagaaggccactttcaccatggatgtccctatccacaacgtttcccagcaccaggcagccgtccacacgtctaattctaccgatgagggccctagccgcgcagcttccttcgtcagcaattattccgatgtcagcaacaccatcagcagcgcaactctgagtcctgtcacccgcagccctgatgtctccagttctgagggctccgtggactctcgtggaatcaagcgcaagcgatttaccaagaccctctttggtaagaaaggataccttgatgactacgaggggcggcgcgacacgagattccgcttctttaaggaggccatcgaaaggggacattcaacctttggcaatattaaaggaatggtaagtgcctcctgactcatcttttggaactatgacggggactaacaatctttttttttgacagttttgggatgagaatcgaggtttgatcagcccatcaaccaaacccagcatcgtcactgagaacactgctcccattactctgaacaccgaggtacagtcgattctgtacgccgagattgagggcatgatcacccacgccgccaacgaattcctgatgaaggagtactatgacggtcacctctctactagttctctccaaaaggtgaaaagaagatgggagaagaagcacatgcctggtgtccctgaattccgtttcgaccaaggtacccagtaccgcattatcagcgcaaaccgcgagcatctcaacttcggtcgacccagcaacggccttggccggaacaccgttctgggtaactggaagcggatatggaagaatatgagcatccgcaccttcgtgtctcccgattcggttatcaagaagaacatccacgatatcatggatctcctggagcttttgaacgccagggaaggtcaccttgaactgcttatggccctcgatgcgcatgttcgtggacagctgcagaagcacgagatgttgctgtactactgagatactctcgctcttaacttcggctttgtcgatttcaacaattcatgtctctttttcgttttcctctgctattctgtttcggctgttctgttctaggaggtcatcagtttcgcttcttgccagtttcgctttcgttttcgcttttactattttttcttctctttctatgcgttttttgccagcgatgagatcaaccaattcagtctagcgtatttcaaatccaacatcccagatgaaccttttttcttttcctagtagaccaactggaagtaagcatccctaggtaagatattgcaatgacatcacatgaaccgaaagagaattgatagctaacgaattcgacgctgtcttgaagcgtgttggctagtatggtactataaatagttggaatattgatgataacgtactgagtcaatcaaattagaccactcatcccttggcaatttgtcagacgttagagattgaactaatttccaaaggataatcttaatttaatatgtattcccaacataacaggtcaattgaagcgaaagagcaccgaaaaagtgaagttgtacacaaaacacgtggggcgacgtcatcggcttatagcacgggtgccacctgggcaggcagtcaccgctctgcttttgacaaagttcctgaaccacttcttgtaaataaccttaccttgccggtgtttcggacagaacatgttgtagctgtaacagtctggcccccaatgaccgtcgatacatcccgcgtttagcctccatccatatccgggggtggagatcgataccaactcgaacacaaggggtcagctccgtacaatcctcccgaatggcgggcccgatccacacctacggtccgagttgcctgcttgtggatgaagagccggacctcaccgaatttcaatcgcttcaatcaccaccagaaattcggtcacatttcttctacatctcatcattgccgattgacgatccactggctcccctgcctccacctacaagccatgggaccagcaatgagagagttcctcccacgccattctcggccagggataacatcgccttagaggaagcctggcgtgatctacgggaagcgagaaagactaaatccgcgaaccacagatccaggccaaatacatcgacagggacccccgggatagctgtgcccagtcatgaatcggtctcaaatgtcgaacaccgcaaggcagccagccaagaggatccctcgttggttggcagtagaggaagcactctgagcaaccctcctttcttcccggacgatctgccctaccgcagtcacaagagttccctcacttttgccacaggcagtactggaatgcgaatccatggacttggcaaggagaatcgcgtgggctccgcattgggtgatgagtttaaacacgacactcccagaggaatttccatcgatcagaaagaagtgcgatcgtcttcgatcaatgagttcaatacacccaaaacaagcagctctccattggagactgaaaatgtgggtgaaggcgacgaggtggttggaagtctacaggctgatcgttctcacgatgcaagcatgagtggctctccctttatacgggcgccggtgtctcagcctcagacgccgcttggtcgctcatttgagtcatcttcatcaagagaaggaggcgaatggcaggcggaacttcggcccagtactgctccacgaagtgctccgaaaccttcgggcctgagaacgaccgtcagcctggatcaattgacccaggactcggagagggagatgacagaggagccgaacaaacagtcaaagattccagtcggtgtctcacggcttcatctagtcgagttaccaaatctcaaggtgagtacaatttctacaatttctttactcggctctggcttacagtaacgctttttttatagatgaaacctatctactggagtcctcttcaggacatatcaagtgtggtccgagctacgtggttctacaagaataccatgttgcctgttgagactgaacttgcgaacaaattggaggcaggctacgtttacttgaagccatggagtgacacttggcaagatgaattaaatagttgcgtggaaaatggggccgatgccgagttgaaaattgttcacccgctgtggacaaaacaggatagtcagccttcaactgcacaagtgccacagagtagtgattcgcctctggatgaggcggaggatcccttgagattcgacaataatcgagctgctggtggcacgtctattcaatctgagactatcaagtcataccttacatcaagtgccatctatgtcgatgcaaaaaatgcccaagtacttcggcccagcttacttccctcagtgtcaaggggacgacgacctcttagtgcaataaggaaaggccatcagataggcatacctgtggttcgcggctttagtcgaaaatcatgggaacacctgcacccgtcaaaatccaatcctatcgatgtgcgccattacatccgcaagacccagtcgaaaagtccttctgcgcaaggtgaacaaatatgctatgcatgcaagatggaagaatcgcgaccatctccaacagatttggttcttgttatccatggcatcgggcagaagttatcagagaggatggaaagcttccactttactcatgccatcaatgcatttcggcgagaggtgaacatggagctcaacaacgaacctgtttggccgcatgtgcgtcaagatcatgggggaattatggttcttcctgtgaattggcgcacgaacttgtcgttggatgaccccgatgttgagtcaggtatcgaagacccagctagcaacaacttttctcttgcagatatcacaccccagactctgcccgctattcgatccttgatcagcgatgtgatgcttgacattccttactatttgtcgcaccataaaccgaagatggtcaaggcggtgattagagaagcgaaccgtgtgtatcgcctctggtgtaaaaacaacccagggttccaagactccggccgcgtacatctcatcgctcattctctcggaagcgtgatggctgtagacattctcagctatcagccaacacatgttcctcagtttgacttctctaatacggctttacgcagcgacatttttgagttcgatactggacatctcttcctctgcggaagtccagtcggcttctttctgcttctcaataagggtatgttgaaacctacatcattccgccttgtatctaacattatcccagctagccttcttccccgaaaaggcagagacaagccaggtagcgaaggtgacgatctacttcgtggggttgccggcgaagcaggtcaatacggctgtctcgccgtagataatctctacaatatcatgcacacaacggaccgtaagtagattgcacagcctcttcgcttcttatactaaccatctctaccagcaattgcgtaccgagtcaatgcaacagtagactcaggcctttccaactctctcaaaatgggcactatccccagctccaccgccagcttctggcaatcatttggaagcgtctttcgctggaactcgaacccgtcaacattattgccctccacagctcctgcccgccccgcagcagtatccaagctgccatccaatgtcgagctcgagacccacgacttcactcgcgaagagatcgctgaaaaacgcatgcttctgctaaatgacaacggtcaaatcgattattatctatcaggtggtggtggccctttgaatatacagtacctcaacatgctgagtgcgcatagcagttactggaccttgggtgattttgtgcggttcttggttgtggagattgcgagaaagcaggggagagaaggaacgctgcttgcctttcgggctgagaagaagaagggatggaagtattcaaagggttgattcttttttgggcctttaccttcggtttgatttttattttgtgctctggggatagaatatgtaccctaggtgattgtgatattcacatagagacaagcatacatgacttcagatgtcgttccctgtaagcccacaacgtacttgtattttattaaagattgaaacttggttgttgacggtgtattgtctgatcgaaaaaaagatcgaaaagtttcgaagcaggacagaaaggcaagaaatgtgcaaagcttgaggacagacagataagaaacaacacaggcaccaggagatttaagctccgtctgggtgtaaatcatatatcgtatcaggtctctagcaaatgacccgggtgtctgagccatgaacattccccatcagcaaagcctccacgatctcacccttgataccaacgccccgcccagccctcaacaccaccaaggcattcgctttggccaaactgccgaccttcgaagaccgctgtccggcaccctccactcccgtgctcgtcgcgtacagccgtccatccgagcgcgacgccgtaaccacagcgcggtggtactccgtgcgcacgggatcacgcgggaagttatgcgttaggacgacagcaacaagcggaagaccgagctgcggcgcgagccaaggcttagagctgagtgccccggagctgtggcccaggccggtgagtttatgcagcgaagggagaacaaacaggttgagggtgacaagggcggaggctggatttccggggagcgagaagatgagttttgattgacgctcctgttgagaggatgtggcgtcgccgattggtttgaaggggacagttgcgaaggtggttggtttgcccggtttcatggaaacgcggccgaagtggatggtgccgccgagagagcgctcgattgtcggcttgaggaggtcgagctcgcccattgagacgccgccggttgtgattatcacgtcgacgctggaggaggctcggcctacgccgcggagtgagtcgcggagggcatgctcgagctcgctagcaggtgtgtcgcgagcgataccgagatcgacggtttcgaagccccatgagttcagacatgagagaagagatgggcggttagagtcgcggatttggccgcctgtaagagtccgcgggtcattgtgctccaccagctcatcgccggtgctcaaaacgcctacgcgtggtttccggaagactttgacagtcttggtgccggttgatgccagtaagccaatctctcctcccacgggagatactagatccccgcgagcgacgattttggagcctaatgcgacatcgctgccaggctcgcgcacattctcgccgggctcgatatccccggcgaggatttccactgtcgcttcttccttgccgtcaggtgtgcacgagtccaaggtggtatcctcgaccatgactacagcattcgcatttggggggagaggggcgccagttgtaattctagcgatagtccccggttgcaatggctctagattcccgccgacattggcatgggtaatggatgctaccgggaagatacccttcgtggacagttcggcggagcaagagtctggtgcaatgatagcgtagccatcgacgatactagctctataggctgggacagcctctgcggcgtagacgtcttcggcgatcaccgagccaatcaaggatgtggtcactgggacctcaacgacttctggctcaggagtgtgctcattgatccgccgaagcgcttcgtctacagacagcatagggtagggtgaggatcgataacgccggttagggcctgcactagggtcgttggactgcagtctctccgacggcgacgtatgtgcctttggggccttatgcccatgtccatggtcagaaccatggtggtggtgatgatgatgctgatgttgttgttgatgatcactaacgccggcctctgattccagtttcttcacacctccagcatggaggttccgtgaattagccccagcagactggagacaggcatgtggaagaagcttaacaacagcatcgaggttctccatggctcctttgggtgaaccgggtaaggtaataatcaaagtcttattgcggacaccagcaactggtctggccatcatagcaactatgcggaggattagctgaaataaatatagtcaaggagaagcgcaatggcagcgcccctgatgtcatgctcacatggagttactttcaaggaggcagcaatcatgccgtgtctgaagtcttggttagtttactagcgtcaatgcgctggccagggtatctaactcacactagtcccggcgcatggcgttggattagaggagagacggcctagtgatgtcatgagcataagaaaggcaagggtcagaatcagaatcacacacttcgggggtgttgtccttgatggcaaatcctgttcctccgctaaggaggatgaggttgtaccaattagggctatcggcccattcgtatatcgattgctggatctgggacacgtcgtccgggacgatcctgaatgcggggggttcccacttcccctctgcggccaagataggcctaagtgcatcgacgaccttgtcagaagcggggtctttcgaagcagtgtcggagacaatcaggattgcggctttaagtttgttctccatgatatgcgttgtgcataagtctggggaagtggatgtttggcgggggaagttctgttaaatcggggaaaacatcggactccaaagcccgacgtaagttaatgtggttgatttatagtgcaattagtgaaattgatgccactgctgcttttcgtacacgccagaggttagtctcttccaaggttgttcgtgttagatacgaattatcccgaggtccttgaaatccggtttgagtgtacggagtaaccccaatcaattcaacctgattcaacccaattagatccagttagattggacactatagaaagatataaatacagagttgccttttaataaattttgaacaacaggtcgacatgcttccttcagtaagattcaaaagcgaggctaaatatgtctagggataagtgattttatctgatatccatttctacaggtatttgttcatatccctagtgtaacaagctagaactagctcacgcatcctcaaatctgatacatgatctccggatcattgatgcaattcagcaaaaccaaaatggctctacgtggtcgaccccagacgccccaatgcggtgtatatcaaaacatgaacataaactatgaaaacgagaaaaaagaggcgaagcggatcgcctggggcatatgcttcgattcccgatatttgtttgccgccaaaattggaagctcttctctctccaaggaaggctcaatctcaggccgcctccaatatcactgccttttgggccacgagaaggccaacaatcaaaccgaaaagtcccaggactgagctgaaaatctcgatgacgagaatcttgacgaatctagaaaaaagaacaatgtaagtgacggccctaaatatcatatcaacaacaccacgagggtcacttacaggctggggtcggcggcatcggccagggcagcaccacttccattgataccaacggagataccgcaaataagattgcagacgccaactgtgattcctccccagaagaccgcatatccagtgtagtagttgctagaggtgtggattccaccttcggctaccgggctgagctttgaagaaaaaacaatggccatgatgacaccgtagatagcgacgacttcacagaaaatgatggagatcaagttcttggtgcgaatacggggtgctcggacaccaccaccaacaatcgatgagccggtaaggaagatacccctaagaaaatatgcggtcaatatcgggatagttgagcatgccaacggggagcagcttaccatgctgcgccgacaaccgagaagccgatacaagaagcaattccgatatttgcccaagcataaggagaaacttcctcaaggaaacggccgacctaatacgcgtcaggttattaaactttcgaaaaaaaatgggtgatttttgagcgtgaggttccgtacattgaatgcttctccgtctccgtggaagagcatatctagaattcagaccatttcattagctgccagatcgcacttcagatccattgaaacgtacacaatcccaccacgataagagcggtggtggagacaccggccggatagaggtaagccatggcgacctctataagcctgatgacgaatgaattaaaaggtcaggatgatcgcagacgtagagaacgcagccgataaggtagctgaagctctgggatggaagcgggtgatgggggactcggtggccggagcggattaactgctccgttcaggcggtgacttcgcgttgcgcttccccggacgtgttagaacacctgtttccccctgcttttactgttcttccaagggaagacgcctgtcttaaccttctatattctcataaggcttgtttttgtgtctttgacccagtcacaagtccctgacctcattccgcgccactttactacccctgaatttcagtcgcatcaatcactccgtgataatggcgtctacctccggggttgggtcgtattcgaaccccttgaagaagtttaagtaagaactgggacggcattgcaacggtgtggcattataattgcattgctaacggagatatctaggctggtattcctaggcgaacagagtggtaaggatctcatcactttatacttctactacatgcgctctagtcattgggaggggctgacacaagatatctaacgctattgcagtcggcaaaacatcattgatcactcgtttcatgtacgactcgttcgacaacacataccaagcaactattggcattgacttcttgtccaaggtacgccacattataccccgcacaaggattataattcaggcattcctccgagatactatctattcgcaaaaatcagggctaaccatcgtattcagactatgtaccttgaagatcggactgtccgtcttcagctttgggataccgccggccaggagcgattccgctccctgattccttcctacatccgagactcgagcgttgccgtagtggtctacgatatttcgaatgccaaatcgttccaaaacacgcgaaaatggattgatgacgtgcgcggggagcgtggaaacgatgtgattattgtgctcgtgggcaacaagaccgatttgaacgataagcgggaggtcaccaccgcacagggcgaggaagaggcaaagaagaacggattgatgtttatcgagaccagcgcaaaggtcgggcataatgtgaagcagcttttccggagaatcgcccaggctcttcctggaatggaaggcgaggccaaacaaggcgaaagcacaagtacgttcattctcgtgttttatctaccgacttctcatactgaccatgatccctcttccagtgattgacgtcaatatcaatcccaaggagacgaccagcaacgacggctgtgcctgttaagattcccccgcatccattctcccgtccttaagtgccctacctcgatgaacatcgaggctgtccatgatatcctacaattttcgaatatgtacatgtttcttctttctttgcttcctcctcctgtcaatagcgcgtgtctagatctctcagtgccgaatgcggttgtgtccagtttgttttctgatctcgtgggaggagacaaggtgttttgatttccgtttaaccagcatcatacgtttttttttggcagttgaagtttcttcgcttgacttccttttcggggtcttttgattatcgctctggtagcatgggctaacatgtctgatatgtttgatatgctttaattgatgaagctgtataatatggcatttcccttctgggtaacgcaccgcatagccggcgccaatgaaacatgaactccacactattatatatatccaatttgtccacggaatttttattcaaccgatgacgctaagaggcaagtcttgactagttatcaaagacaaaccctttaacatctgtctcacgctccaaattccacattctcttgattaaggagtcgaccttggtcgtatctgtgatcccgccatatttagcaagcgcgtgggtttttacctagaaatgtcatgtcagaatatgattatatatatcttccccttacccaagagtgagctatttcctgaggtatataaacaaacaagccgatttaaaagtacacaacgaaaaggcggtatattgtgtaacgaattatatagtcagactatagcatctcagtaggaagtcaatccatatttgtataaacagttcaaatcgcaggaggactataaccgactaatcaactacctgattaggaacatgtatgccttggtagtaaggcagaaaccgtgggttcaggcatcaatatttcataatgcataaatgcataaaatgatgagtaaagtaagggggcaagccacctatgcatggaaatgtagtcttcactacctccaaggccacatagacgtctatcaagtagaccaaatggataaatccaagatgaccgaatggtacaagccaagaatgagttcattaaatcaccgcacggtgaaaatgtaacgcatccgagcagaaatcgggcaattgatctgcgggcggatcgcccgggaaatggcgcccctgggccatctgcgttgccatacacccagccttttttcctcttcccttgctttgcccgtatatatactcaaccacatttccatcgctatttccatctcgataacgcacattcttggccagaggccctaacacacacactcatggggttcgcttcccgttttctccgcattccgcggccagaggtgagttgagatcgaatcttatcattgccccccggagctaacttatttcgtcatctcaaagtcctttttctatctgatgagcttagagactggtgcttccttgatcacactttcactgctcttgaataaaatcagtggcctatatggcctgctggctcttttgaccggctaccacctgtcccccgtacaactctcaatgtacctttggtccctcattgcccttggactcgcctcacttctgttcccccacattcgcaaacagtcgcctctgcaatgtctcgccctcacctacctttatgtattcgacagcctaattaacgctgcatacactgccgctttcggtgtgacttggttcttggtggtatcgcaacattacgatagtggcaacgccgcgggtccagggggcgagacgatcgcggaaaccgctggcttcaccagccccaagtacgatgcagcatatgttgagatccagaacacaaaggaaggaaataacttcatcgctcatcccccgcggtccgccgaagatttcagcaatgtcgtccttcaacccgagagtctccccagcatcatcttcatctgccttctgtgggtgattagagtctactttgttctggtcatgctcgctttcgcacgccaggccctccgtctctgggttgcggtcccgcgacacacccaactcccgacccacagccgcaacgtttcagtcgccagcgttgccgatatcgatcgggagcctttctccccctacagtcccgacggccagggctgggaaggtaagttgggtcgtgtaatgatcagtatcggccacagctattggctgggtgaagaggaagacggtaactggctcagcggcatcaaccacaagttccgcaaccgttcgggcaatacggagctgcccggcgcgctagaaagagaaagaagacgacgttccggaacgggtccaccagcaccgtcgccatctattgttcgatctactgtccttcaacagccaattgctgagactacacctgctggcatgaatgtgaagatgcaagattggaccgcaccccgataaatgatcttttggcggctattgaacaatattagtcgcaacaatgtacagccctcgcttcgactcggctccatgtcttcaatcccccatcttcctactggctgtgtgcattagatgcaacgaatttgaccgtacccagtcaaagggcacaatccatcttggctcttgtgtctgtcccatcatttgatgaagtcactgaatcggacaaccggccatttgatttcattcgatactccaccatcatgaagcccgagccccttttgctcgatacttacgacaaactgcatatatgaatttggaacgggtccaggtatatggcgatgatcaggccacatgtgtccctgattgatatctgggtccccctgggtctggaaggcgttttcaatctcatgatctcaaaatgagtcttccttggtggcaccactcgcggtcatcaatctgacatgcacgattttggcgtcgggacatggatatgtatattgcttatctaaaatgggggttctgcatatttccccgcgagggtctcatgtgttattttgtacacaattgcttttgcacacctcacacataataataatttcttctggatgacgattcaacagggtgtagtcagtaatactgcaatattcgagtctgtacaattcggaaggctatgaatccttctaatactaaatgagtcttgtagattcagcttttttcctgatagacgtctacaagatatgttgtagacgcactcggccgaattattacaatgaggctgattggctagagccatgataatactcgaccgagatcggtgcagacatttaaccttcggcatttgaccggtagtcttgttctagtagggatttccttcaggtctttggaccatcgagccctagaatagactgaaaggacaggaatatccccaataaaaatgcatttattgggcataggtaattgccgtggtgctattggtacgctaaaagcatgaagaaagatacttaatcgatgctctgggagccaatagcctgataactcgggattagtggacttcacatcatgccataggtcaagcagatcccttgagaatcccggtatctaagtaaattccatgaaatgtcgatgtggttctcgtagatgccaggcaccgcacaagaacctccggccaaatcccggcgctgacgtgctcgacggcatcacgggatcccccgcactgggcccaaataggaaagtttgcatttctgccactgggtgtttgcactgatgtcgtgatcgaagaccaatcagcagattgctgatctaacccccgacgacggagaaattgaacgagcgagggaaagaaaaccactggctcttttttttttttccttgtctagcaagagaattccaagagagctgagagacataatatttaattgtctcctctcatttgttaccatcctcttcggttctgtgctgcgagtgggagatcgctgcatacatactgataaggtatatcgcgattttatcatcccacttgtgctgtgatctcaacagccaatagtcgcaaatatggtgtctatctcaagcgctgctgaagcgggtatgtattttcctattatttctcatccttgaaaaagggagggcaatggctgatcctcatgcaattgtatagtggcaagaatcgcctacctcactagcgataccgttctatccgtgcagccctcattgcagaatgactcattgttctccaaggccctcaaggttctcaaggctaataagacgaccaatctcacgtcaaaagtcaccgaggtgagttgaaaacgtcggggttgccagactggaacccaactaatcctatttccaggttcaagctgtgcgctataatgaagatcccctcctgtctgccttcaccccccttcagaatggcgagactacctccgtcgtcactagctcctcggtcctgattaccgccgtccctcacctttaccgtctcgccaacagccccgtggtcattcacgttgctctggagccctctccgttccccgattactccgtaatcagctccatccgccagtccggtttcacattcctccactcagagaccgtgcaagaggctcaggacatcgctattacagcccacgcgctcgcccacaagtctgggaagggtgttatccacttctttgacccctccaactcggccaaggacccctctattcccgaggaggacgttgaggttgtgaagaaggttctcagcgttggtggaaactctgccatctctgctggaacccagactctttacgccgagtctggtcgtgtggccactgtcactgaagagaccgtaggtacttcacccgctggtctacccgaaccagcgaacttgaccgtgccctctcaacctcaaacccccttcaacgctagcgttgacaactcatcggttggctcctcacggagagacagcagtgctggcagtgaagccccgagctcgaccgcgacgactgtagacagcgccatcgctcggcctgttaacgcggccgatatcttcgagtggacagctcagatttggaacactctattcgaagaggtgggccgcagatacaatgccattgagtacaccggcgctgccgatgccaagtctgctatcttcctctttggctccaccggagtcttcgtggatgctctcgccagtgccggtgccaacccggagttggagaacattggcctgatcactgcccgcctgtaccgcccctgggttggtggacagatttccaactctatccctagctccattgagaagatcgctgttctcgagcaggttcgcaagaccacccgatggggtccttctttcatggatctattgtccagcctgacaccctctggcgctcgcgctcaggcccctaaaattgtcgggtaccgtctcgggcatattgagccctccactgctgttcaggcccttcgcggtgtcttgcagaacctaaactccgattctcctatccagaatcttgacatcggaagctctcaggttcctgctattcaacctgctctcgagcagcctcgcattgagaatgcttacttgaagatcttgagtcagctctttggagagcgtctccacattgccaaccagcttggatccaacaatgccggtgtttcaagcactattgccgcgagccccgagtttggatttggttcactgctagctcgccaggaccgtcgccaacgcttcatccgggaggttgaggaagccaccaagtccaccgcttttgctactgacgttcccaagacttggttgtctcgctgggctctgaatgtgaaggaagccgccaaggccaacaagcttgctcctgatgtgattagtcgcctctccaacgatggctctgcgatttcccgccaactcctccagtctaagagtctcttctacgaagagtctgactggctgatcggctccgatgcctgggcttacgatttgggtaactccggtgttcatcacgttctcgcatctggcgcgaacgtgaacatgctcatcatcgactctcaacccttctctgagcgcgctgcgtctgacgccactcgccgtaagaaggatattggtctctatgccatgaacagaggtaacgcttacgtcgcctcggtcgctgtttacagctcgtacacccaggttcttcaggccatgtccgaggcccagcagttcaagggtccctcagttgttgttgcctacctgccttacaaccaggagaatgactcggcactcacagtgctgcaggagaccaagaaagccatcgatcttggctactggcccctgtatcgctggaaccccgacaacgaggagaagggtgagccaaagttctcccttgactccgagcgcatcaagcgtgatcttgagcagttcctccgccgggacaaccagcttacccagctcatgaaccgccaacctaagtatgctcctgtgctctctgagtcctatggcaccgaggttcgtgctatgcagaagagaaacgccaaggactcatacgagaagctcttggatggtctgttcggtgctcctctcaccattctctttgcatctgacggtggcaatgctcagaacattgccaaacgtcttggcaaccgtggtcgcgctagaggcttgaagaccatggtcttcgctatggatgagttccctgtcgaggacttgcctaccgaggagaacgttgttttcatcaccagtactgcaggccagggtgaattccctgtgaacggtcgtagtctctgggagcatgttaagaacaccggtgatctcgacctgtccaccatcaactattccgttttcggtcttggtgacacccactactggccgcgcaaggaggacaagatctactacaacaagcctgccaaggaccttgatgatcgcgtcgccttcctaggtggtcgcaagctcactgacattggcctcggtgatgaccaggacccggatgcctaccagaccgggtactccgaatgggagccccgcctgtggaagtctctgggtgtcgataaggtggaaggtcttcccgaggagcctgctccgatcaccaacgaggatattaaggtcggctctaacttccttcgcggcaccatcgctgaggctcttcttgatgagagcactggctccatccccgctagtgaccagcagctgactaagttccacggtacatacatgcaagatgaccgtgatctccgtgatgaacgcaaggctcaaggtcttgagcctgcgtacagcttcatgattcgctgccgtctccctggtggtgttgccacccccaagcagtggcttcagatggatgccatcagtagctcacacggtaacgagaccatgaagctcactaccagacagaccttccagttccacggtgtgatcaagcgcaaccttcgtggcgccatgcgtgccatcaacaactccatgatggacacactcgctgcctgcggtgatgtgaatcgtaacgttatgtgcagttctctccctgagctgtctgacttccaccgcgagacctgggcaatttctgccaagatcagtcagcacctgctcccctcaacctccgcctaccacgagatttggctgaaggatgacaatgacaagaaggttcaggttgctggagatgcgatggttgaccacgaacccctctacggtcctacctaccttccccgcaagttcaagatcactattgccattcctcctcacaacgacactgatgtctacgcccacgacattgggttgattgccatcaagggcgccgatggccacctcgagggcttcaaccttctggctggtggtggtatgggaaccacccacaacaacaccaagacctacccccagaccggtcgcatgttcggatacattcccgccgacaagatccaccttgcctgcgagaagatcatgctcgtgcagcgtgacaacggtgaccgcaagaaccgcaagcacgcccgtatgaagtacaccatcgacgatatgggtgttgacgttttccgaagcgaggtcgaggcgcttctgcccgacgggctcaagttcggcgagccccgccccttcgagttcaagtcaaacgtcgataccttcggctggattaaggacgatactggtctcaaccatttcacgtgtttcattgagaacggtcgtatcgaggatactgctgatttcaagatgcgtactggtctccgtgaacttgctgcgatgggcaagggcgagttccgtcttaccggtaaccagcatctaattatctctcgcatcaccgacgaagacctccccgccgtcaaggagcacatggccaagtacaagcttgacaacactgctttcactggcttgcgtctgtcttcctctgcttgtgttgccttccctacctgcggtctggccatggcagagtctgaacgctatctccccgttctgatcaccaagctcgagtccaccctggaggagtgcggtcttgctcgtgacagcatcgtcatgcgtatgactggttgccccaacggttgtgctcgtccctggctcgccgaggttgcctttgtcggaaaggccttcggtgcatacaacatgtacctgggcggtggctaccacggccagcgcttgaacaagcgctaccgctcttccatcaaagaggatgagatccttgacattatgaagggcctcctcaaacgatactctcttgagcgcgacaccgacggcgagacccccgagcgtttcggtgattggtgtatccgcgccggtatcatcaaggccaccaccgacggacagaacttccacgatggcgtaagtgattccttctatgatatccaccctattgattctaataatctcctacaggttgccgaagatgaggaagaagaagaagagtaactgctgaacacagccgttacacatctaatctccggttttttatgactctcatgggatctaaaatttgctttcttccccttctaattggatattttcacgtctgtatctcacgtcgcaatgcattgatgtcttggcgattgtatgattccatgcaaaaatgttagatttcgtctttttttctcttttattccctttcatgtgcatttcaatgacagctcaagtctgcccgtacatatatactcaaatgatatcatttctctagcacctcttgctatccctctaggccttgaaaaggtggtagaaacccaaccgtggaaacaggccagggggcgttggtaaccacgggaagctgatgcacagctgacatcacctgggcaccccagtgcgtctttgacttcaaaagtttcaatgttgatttcaattgatcatcccttctatcattctttctatcattctttctatcgttacttctatcgttacttctatcgttcctcttattactttcgttaacgaccattccagttgcaatatgcagatcaatatgaaatcgtttttatcagtgatgttcgcgccactgctctatctacgccctcgcttccgtcaagaccaggactggtcatatcgacaagcactagcaaacactttcattaaagtctttctatacatcttcgtggcatttcgcacaaaaccaccactttccctcaagccaggtctagacggagaccgcttcgtcgtaatagagccaggtgcaccagagctctacactaccattgcagtggacaacgagatccagccagtcaccgtgggaggcacatggttcccatcactctaccaatacaacacaacgactacccaagataagtacgtcgtgctccagtttcacggcggctcttacatcctcggcgacggccgcacatcatcttgccagttcctcgccaacaggttgctagagcgcacaccggtaagtcacgtcttcagcctgcagtaccgtctagcctgcaaccccaacggtcgtttcccagcccaactccaagacgccatctccgcctattcatatctactccacaccctgcacatcccggcatctcgcatagttctcagtggcgacagcgcaggcggccacctcgccctcgcactcctgcgttacatcagccactttgacgacgagaaggccctcccaccaccaacatgcacgtggcttttctcgccctggtgcgatattcccgctgcccgcaacgaggatctctggaataatcttcccaatgtgcaaacggactatatcccaccgtcgttccctaaatggggtgcaaagcattttattggtaacctagagatgacgagcgaggtcgagccgtatcttgcgccgctctggcatcccttcattctgccttcccctgttttgattgtgtccggtggcagggaggttatgtgtcaggaacatgatcggttagcgaggcatttgggtaaaattcagcagaatgaaggtcgagtggagtatttcgtgcaggataatttgccgcacgatgtgcttatggttgcatggattctgaactttcgaaaggaggctgatcagtgtgctgccaaagctgggactttcttgacgagaatgcagtctatgtcagaggaggatgctactcacgttccttctgtggcttttgagtgacgatggtgttcctatgtatgccatggtataccatattgctacctatgtattgctatttgagctaaattatccgattgaatctacctagtagaacgactgcggttcagataaactctctatagattctcctgggttcattgtaaggctctttagtagccttctattatctcagctctatttctcttcgcctattgtcatttgtttggtggaaagaaccaggaaacaccaccttccctaaagtttgacttgtttttcaaagtgcagtggtttgtttgtcaggcgccaggcagtccccagctccttcagatattcacctccccgcattgtcttttcctctctccttctctttcctctcaagattgtgtatccatcgcatcttgcaaccgaggatcttattcttgatactatcgtattcaacccaacgctaatcagcgttgatctcatacaagttcgttgggatatcgattatcgatttccattgcctttttcgacgcgttaacgcgttgaaaacactaggacagacctagataccccgcaaacgcgcacagctttgtcgtcaccgggcagtggtatacccaccgtgtcagctgaaaatggcacccatcccaggaatgactggagagcccgcgcgctttgagaaccagtacgacatagaatggacaggccacggcccgtccactaaaataattacaactgacacgtacactagctacagcaagctcgagaattcccacgggctccagggttggcccctcttgcccgtcttcactgccagcattcttattgcgcttattgttgtgggtatcgtcgcccacgtttgcttctggggaagagacaggtatgtgaagagtagcctattttggattgcggatcgctgatttgagctggtcatgcagccacccgcaagctgcatcttccgaggataagatgaagatggagaacaccaaggaaacccgctccggtatgttgagacattatatctcttgctatgtgctacgctcacgatgtatagatggctggatgtgtttcattctggcctgccatgctgtcattaccctcggtgtggtctaaagaggaacatatacagctgctggagaattgggctgtcagatgaataccccctgttctctggctagctaacaattctccgtggaactgcatttgtcttgtggaactcgaagataagactcctagtctggtgcttgtcgtctcaacgtgatgtaatgatctattcatgagactggatcgaagataagttcgattctttacgaataatatttctttacctaaggaataacaatccactcagcacaaactgagtggagaaaagcatgtactccgtacagtctaaattattatcgacagcagaacatgttagccctatagcatgttaacatgtcaacgggtgtcggtcagctactgcgcaaaatggaaaagaccataacaagtggaaagaaacatgaccgagggatcctgagctatttcccggtaaggtgcaagccctgcacgaacgtcacatactgcagtttctcacgagattgtttggcggcgaggacccagcgagagatgacaacacgctgcgatctgaatacgtactaacatgatggctgttgagatcgatcaagcgacaattagaaaaccgctaggattgaggatatttataaagctacgagaccttgggtgatggatctatgtctcaccaaactagatctaaacaagcctacgtgggtcgaatatttagccaaacaactctattattgacgtgcaaatcctaaagagatctgagagtagtccacggtccagctaattgtatttagatcctgctcaaacccagccatctccgtcagttgacatcgcaccaattcatccaacccgagcatcctgaaccgcgccatgatgtaaggcacatcggatcgcgtgggccacatcattctcacatgggtgagattgcaaccgacatcgaatgatgccggtgcctgcttcttaggtatagaggcgcgaagcccttgcctggttggttggtcattgcgaccgctttcaagtgactgactgggtcacggtgggacgaatacaccaccccgcttctggtggccttgacgtcccttactcattgcgactaccccatccgggggcatttctttgtcgacttccgtatggttggttgccctatactagggaaccgctctcaagtgactgactaggtcacggtgagacgaatacaccaccccgcttcgggcggccttgacgtcccttactcattgcgactaccccatccgggggcatttctttgtcgacttccgtatggttcgttaccttagttaaaaggaacggtgcgtatcttggcacaagcgtgtcagatgccctcaagtcatggtagcgggctgatgtaagtatggacgaacagattgataacaatagacggaaaataggaatatttgagcaggggtgcgtctctcacgctaggaaggcatcaaagaagaattggcgtgttcgatgatgacggaggctagaagagcctcgacgtcaggagagtgcttcatgatgagaggggggatagcatggtggctctctcagcacaactcggtggtacccaagaagaaaaaaagagtaaacaaggggggaaaaacgggatcttgattcaaaccagtacacaagagcggtgagtacataatcctgaaccgataactagctgtattttctgccacatccccgctgaggaatttcgataaaaaaagttatcagtccaagtcgttcattttgcaattgttactggttccctcgttctttcgcgtccattgttcatctaagatatttagtaaccatatcgccatggcttttcctgatgacgatcctgtcgtcgcttcctacgacgtcctcctcaccgactccgatgtttctcgctatgtcttccaatacgttgatcgggaacacgaccgtccctacaatgaccaagaaaatcaacgaccgatccaacttcgacttaagccgcgcactggtcttattgaagttgaagtccccattagtacccgagaaaactacgacgtcaacaagggaatgcgctatggggatgcggtaaagaagagccgttccgcgcgcgacgggggtgcttacggtatggcaggcggctttactgctggtagcgggaccgcagctgcaggagggagagtcaagatggaagcgaatggggatgtggagatattggataataaaagggccgtggattctgcatcattgctgcgagtgcagtcacttggaggtcggataaagccttctgaagaaggcgatccagtctacatgctggccaccttcacagatagtacgtttgtcctacctatcactttcttctccggtggcaacatttgattctaacgtctgttcatagaaaacttgcatctctcccccgtcacatcggttgttcaattccaccctcaacttcaccacctggatgctttagatgagatgccaaaagggaaaggctcacgtgctaaaaaggatgacgatgaccgtcctaccgagagcgaagcacgtgcaattgatattaaggtcaaggccgctgaagatagtgaaggagctgcaaacgccggcaacctagacctccttaagcaaatgcaagatgaaaaatggaaaacatacggctgggttgacgccgaggtaagttctctctttgatggacctttctcattcttgtttcatactaactcttaccgatcccaggccgaggattcttggtacacatatgaacgctatatgattcacaaggacaccgaacatctcccatccctagaatcaaacatcgagtcggaagactacctcgataaaatgagtgcccctaggattgatcctacccgccccgacatgactggttgggctatgaaggaaaatcgccggaggcaaagagaaagccgcgcaggtaatgaggccgaatagcgaagagttatattgtacaataatccaatcaaccaatttctagcggaagcttattatcatcctcgcaattatctaaggcttcatgttgcttcaagaaagaacatgggaagccctatactagtagccttgccactcatacttgtccgccaataacgataagacaatgggtatggtcacgtgcctgtttagtttttctgccatctccgtttcatcgcgacaggtccgataaatctccctttctcctgttgccctcgtgttttttacaccttttttcctttctctctttttctcggcttggtcgaggattgtaggacagcgtgccgacgcggtcattctccgtcttctatagcggaacaatcgcactgaacatccatcattgcggtgtcctgtttttctggctgtcatcgttggaaagtctgcatttatcttataatctacgcttaatatctttttctttttgagtcattatattcttattcgctttcaacctccaaccttcgacttccaatcctccaaaaggccaatttcatgcatcatgttatcccgcgtggcttgccaaaaaaatgcctttcttcacttgcggagggctcaagccttccgagcatcgttccatctgccaacaacacgttttctttcatactcgagtaatcggaactcacttttaaatctgtcgtgcaattcgattcacgatcgtccgcgcaatccgtctccgcaatcagaacgttatcttgctacagccgccgagcattctagcatcgatgggcattcacacgagacttacgaccacttcatgcacatgcccttcgagaacttcgatacatcatccctgatcatcctcgactcgacgccacaatcggaatccaaagttttccgcaggaggcatggtgtcggcggtgatgaaatagagatgaaggccaatctagagctctcattgaagattggggagtttgagcgagcctctaagttgattacccgccttggtcattatcatccgcctggctcggatgagtatctcgctatccataaccgtttcatgagacatatggtggcgtatatgatcctcaaccggcagcaggacatggttttgccgttgcaaaaatggtttgaagttgatatgcccgccggtggcgtgacaccggatgcaatcagtttcgcgattatgattcgaatggcgctgcgtatgcttcatggatcgaagcgcgacagaactgttcgtcgatactgggaacttgctcaaaacgcgggtctggaggaagagcttgtcggcattgaggtgcttgaagactctgatgttggtgagctgtctaaggtgagcttacacttctagtctgtactctgatgtcctgctgatgttctccatctagatttgttcctccgacatgctggacttggtttcgaaatatatggatctctccgaagccactgaagtgccttcccctatcgtcgataataccccccaggtgcaagctgccgaccaaaggggactgggactggcatctctcaaacagtccctgtctctcttctccggcaattctgatgtacgtttgccggaaggtttctcaggcaccgaagaggaaggaaaggaattgctttcaaatttgaggcaaacccgactcgaatccgacagtctcgattcggccctctggcgttggcgtacagataatgccgagagacaaaaatccggattcaatgtcgcttccgatgagaaaaagcttaacagaatcatgagcgaatggcacgcggaccttgtgacaagaattaaacaggagttggcgcttgttaaagagacacttgcgaaccgtatcgtaagtatcgagcaaaaagagcgctgtgaatacggtgtgtttttgcaagccctcgatcccgaccggttagctgcactcactcttttgtctgtgatgtctactttcagtcgtcaggggatggataagggagtcaaactttctgcgctcgcttcagtagttggaaaagagttgcaagatgaactcattgccgacacctatctgaagaagagtaagtctatggatccgtgtcgtctaaaggcactgaagcagaccctcgcaaaccgcaaagacaagcaaggccgactgcgatggcgttcgctcgttcaaaaaatcaacgcagaagatgaatctataatctggggctctcgctcacaggtcaaaatcggtgctgttttgatgagcatgttagtcgaagttgcgaaagcccctatttggaccgaggatcctgtcacaaaaaaaagaattctcaatatggcaccagccttcgaccattcctatgagattaacttcgggagacgatccggtcatatccacatgaatactaaactagtggaaattgttgccaaggagccgcccgctgagctgttggctcgccacctccccatggtttgtaagcctaaaccatggacagggccaagaactggcgggtataagatatacgagtccaacctagtgcgcactactcccggtgaactactgcaaccagcgtacctcaaagctgtcttgaaagatgaagggctgaaagagatccgagcaggccttgatgttctcggtggcactgggtggaagatcaatcaacaagtctttgacgtgatgctcgaggcttggaatggcggcgaagctgtggggaagctagctcccttgaatccagacctgcaaacgccagagaaaccaagcccagacgccaactatgaaacccaaagagaatggcaccaaaaggttcgtgaaatcgagaaccttcgctcaggatttcattcggttcggtgtttccaaaacttccagcttgaggtagcgcgagccttccggaaagaggtcttccatctgccccataacatggatttccgcgggagagcttacccactccctccttacctgaatcagatgggggctgataattcaagggggttacttcttttcgctaagggcaaggcgcttggggcatctggcatgcgctggttgaaaattcagattgcaaatttgtttggatttgataaagcgagcatgtcagaacgggagcaattcacaatggacaatctggatgatgttcttgactctgccaacacaggacttcatggacgacggtggtggcttaaggccgaagatccatggcagcttttggcagcgtgttgcgaactccgcaacgccttgcagctttctgagcccacgacatatatctcccatcttccaatccaccaagacggctcttgtaatggacttcaacattatgccgccctgggtggtgatagtgtcggtgcccagcaggtcaatcttgaaccatctgaccgtccttcggacgtctataccggtgtgtgcgaatttgtcaaggaagctattgcacaggacgcagccaacggcgatcacttggctcagcttctcgaaggcagagtgaccagaaagattgtgaagcagacggtcatgactaatgtctacggcgtgacctttttgggagcaacgagacaggttaaaaggcagcttattgactatctccctgatctcagcaacacggagaggaacagcgcgtctttctacatcgcaacaaaaatctttggcgctctcggatccatgttcaacggagcccatgagatccagtattggcttggcgattgtgcccaacgcattacacaatctgtgacaccggagcaaattgaggagctcacgcaagcagcattggtacccatgaatgaacgcgacgagcatttttcgacgtccattgatccagaaaaatctttccggtcaactgtgatttggacgactccactgggtctcccagtggtccagccatatcgcactcgcaagacgcggcgtgttcagactagtttacaagacatcagtctcgttgaccccggcgctgatgatgttgttacaaagcgcaagcagcttcaggccttcccaccgaacttcatccactctctcgatgccacacacatgatcatgtccgccaatgcatgccatgaagcgggcctaactttttccgctgttcatgattcattctggactcatgctgccgatatcgaccagatgaaccttatccttcgagatgccttcgttcgcatgcattccgatgatgttgtcggccgtctcggcgctgagtttagagtgcgatatggcaagaatatgttcctggccagaatcccccgcttcagtgccttgggccgggcgatctttacacaccgctcccgccataagattactaaacttcaagagttgatcaacgaaaaccgacgacaaaatctactcagctcggaagatccagaggatcaggccgagggtcgtgctatggtgacaccctatagtgtctttgaaaacttagggggtaccgactctgacctgactaccttcaaaacgatgggtacgaactcaatcgggtacattccagacgtccttccggatctggaacgtatgccgatagcatgttcaatcgacaccaacgatccggccatcgagagcctggtcggcgacctcgagatgtttgagacgaagcaggcctcacgtgacgagatgtcccaagtagaggatgatgtccatggtgaaccctccgatcagaccgaggaggacggtcaaactgagcagacccagccttctgcgcggcgacgtcagtctcgccacttgaccacgtggttatggatgcctctcaaatttcgtcccgttcctaagaagggcgactgggacctgacccgaattcgtgaaagtgaatacttcttctcatagttttctcatcaccctgggaattaccgcatttccgctggcgtttatgcatacttccacattttgttttagccatttctagagtgctgtggaggagtgacttcgggattcatttagctgacttgtaatttcctgcatcgtttctgcccgattaccttctgggcttcattggttgcatctgtacattacacatgggaagaaaatagtatatactacctgtatgaatatgatattgaacttgaagaactactctaccgttgtctcatcagaaccctatatattacctagtgacccctcaactttaaagcaaataccggagtacatactctcaaagtgaatttaggcaaaattcaaaagaaaagcctaaaaccaacagagagtggccaagcaccgcggatctagccgttttggagcgtcttcagctccctatagcaagtgtacagtgtatactttgccgagctttcgaaagcaaacggtcaagttcgcgtctaaatcatgtactctgcactctatgccgtagaatcccggaacttgtaaatgatccagtctgcacaagaattatatccggagcccgtactttgtacaaatatgcattgttctcccccggtgctaagaccggggttatgtgaccgtagccagatgaggggttcaggtccgaagtattatgcacgtagtctacattttcacgtatctaatatctctagggctacaatacgataaacgttgcttgttgtgccgtatataaccaggatgttggtgtgaaatgtggggaatacggatacatatacagagtacggagtacatacacagaaagcgagcaaagagactttgtagtttcatttgagacaaggcgccttgggagctaaaccggatgaaagctctggatacaagtgtatctgtgtttagatggatatgagagagatatatatacttcctaaaccagtgacaccacgtgctattgccccccgcctttgcatgccaatttccccagattttcggattttctaatcttctgaacctctggacttctggacttctggaattcatatttctggtcttccttttttttgggcggtctacttctaattgtccgacttttttttatctcttagatttgaccttctaaactgtgcgaaagccacgctttgggctgcgccgagggggaaaagaactcccgaggtcgcacgttctctccccgtctttctgcaatgccgttgtgacttctcggtcattctctatactgcatttgactcaatcctttggttctggtagaccagagagtctaggttcccttgatctgtccctctatgtcgccatagccctgcttttgcctcctcggagaagcatgcgatgacctccctctcctccgccaattcttactctcccttttcgtcccaagcaggacggatgacacaatcccaaacccccggactggatacgcttgcggaggggtcgcagtatgcgctggaacagctccagttaacacgtgaagccgataccgctgacatcccaaccgatcccggtcactctcgagactcgaagacttcgcgacattcccagcatcttctctatagcgaacgaaatgtttccaattcaggtctcaaggatccagaattgcgcgattcccttgccgaagctcgctctgctattcgcaaaaactcatccgcgaccccagcccgtcgaagaatcagtcgagcctgcgatcagtgcaaccaattgcgaaccaagtgcgatggacataatccctgtgcgcattgtgttggtacgacttttccttcctaccggactctctccatttgcgcattggttgaactaacggttcccagagtttggacttggctgtgagtacgcccgcgagcgcaagaagcgcgggaaagcgtccaaaaaggatatagccgccactgggatcaacgacagtgatatgggtagtaaccaaaacataacgcataccaaagggcaggcctcaaaaggacagtctttgcacgaatccaacgaacattatgaccgcgcctttgatgccgcgcggactctaagtggaggcgcaaattctcggtcgcataacgcggatgtagctggattgtctgccatgcgccaaaatcaagcgctcgtccaagcacctcctcagcagcagatgagttccaacatagcgggcatgccattcaataattatgcagcgctccaagaatctcaccgaccttcgatgtctgtgtcagatatgcgctctatgcagatgatgcaaaactcgaatgggaaccctcggtcgccaggtacagtgcttcattctcaaggattcggttcggtgtataatgatagcacataccctttgatgaatacgcaagatgcgaatccgagctccatgaatcatttccgcattgggaactcgacggacaacccatcggcttctttcattggattctctcctccagcgcagtcacctagctggttgccactcccttctccatcacccgcaaacttcccttccttcagcatgcctcctttctctagctcattgcgatacccagtcttgcaaccagttcttccgcacattatgtctataatccctcaatctctcgcctgtgatcttctcgacatatatttcaccagctcatcgtcctcacatctttctccatcgtcgccctacgtggttggccatgtcttccgcaagcaatcgttcctacaccccacaaagccgcgagcgtgcacccctgggcttctcgccagcatgctgtgggtctcagcacaaacaagtgaggctgcatttctgacatcacctccctcagctcgaggccgagtgtgccaaaagcttctggagttgacgattggcctactccggccacttatccatggtccagccaccggagaagcatctcccaattatccagctaatatggtaattaatggagtggctctcggtggctttggggtatctatggatcaattgggtgctcagagtagtgccactggcgcggtggatgacgtcgctacatatgttcacttagcgactgttgtctctgctagcgaatataaggctgcaagtatgcgatggtggacagctgcctggtctcttgcacgagaattgaaactcggccgcgaattaccgcctaatgcggcgacccgtcaggacggcgaaatggagggcgagggggacattgatgtgaatggcaacaagaggcaaccatcctctctgttaagccacggctcaggtaactctgcgatcaatctcacagaggaagaacgtgaggagcgtcggcggatctggtggttattatttgcgacagatcgccatcttgcactttgttacaacagacccttgacactgctggataaagagtgcgagggattgttacagccgatgaacggtgatatctggcaagcgggtgacttttcatctgtcaactaccgccgtgctggcccaccctccgaatgcactggccatagcatgtttggatattttttacccctgatgtctatcctgggtgagattgtggatctgcaacatgctcgcaataacccgcgcttcggtctacatttccgcaacagcggtgagtgcgaaagtcaggccatggaaatccgcaggcagctcgatgtttacgcccagagcctgaaagaattcgaggctcgatataccagctctattgccctcggcaccggtgaggccgacacagccatggaggcctccaacatcaaccatgtcagcccatctggtcggtctattagcaccgtaggatcgcatgtgagtgagtccatcgttcatacgaagatggtggttgcctatggcacccacattatgcatgtactccacattctgctggctgggaagtgggaccctatcaacctgctcgacgataacgatctctggatttcttctgagtcctttatcaccgccatgggccatgcagtcagctctgctgaggcggccgcggaaattttggaatacgaccccgatctaagcttcatgcccttcttctttggcatatatcttttgcaaggtagcttcttgctacttttgactgccgataaattgcaaggagatgccagtcccagtgttgttcgggcctgtgaaacaatcgtccgagcgcatgaggcttgcgtcgtgactttgaacactgaatatcaagtaaggtttacccgtgacatagccttagatttacagaagctaatatcctacagcgaacgttccgaaaagtgatgcgatctgcgctagcacaagtccgtggccgtgtcccagaggacttcggcgagcagcagtcccgcagacgcgaggtgctagccctttaccgctggagcggcgatggcagtggtctcgcactttagcaagactgctgaatatctgctgagattctttcggctaccactcgtcttgattttggatctatttccgttttctttgtcaataattttgattttaatttgcgccctgtatactatatttcctggattttggacataccccgaggagcgaaaaggcgcacagtattctgatgtctatatattgactcggcatatactatacctagttgaatattgattttttgtttgattttgggaatctccttcgaagagaacgtattcattttcttttctatactcccaaggggcccatctccttggtaaggcgtctcatttttgccgttcttctgttcgagagtggaatttatgtcatgtgatgaagcttatttcggactccacccaagctacgatcctcctctgctacacctgttcaatctcaaccaccatctatcccaacaaatgaacgtacttgagatcacaaggccaaaaaaatgaaaccctatataggcatacctcttgtgattggacttgtctatcgagcttggtcgcgaaaatctcttaccccgctcggcctggtcgttgcgggatgttcagcctccgctcacgctctccacccatggtcggcaccagtcgcgctccttgcggtattctattttagtgggactaaggttacaaaggtaggaagcgacctgcttctcaatttacataaattatgggcgcagcttacaagatcgtgatgataggtaaaacatgagatcaagtcgcatttgacactctctgcaaccggtgcggaaggtggcgaaggcccccggaaccatatccaagtcctagcgaactctgttgttgctaccatattatcgatcgctcatgcggccatcctggctaaaacagcaggcactgaatcgtgcttctcactcggccagaatgcggctgatatattaattgttgggattgtagcgtacgtcactcaacttcactttctatgcatgcattatctgttctagagcatataactaaccggttcctttttgcagaaactacgccgctgtagccgccgatacattctcctccgagctcggcattctctcgaaatccaaaccccgcctaatcacgtcgttgaatctccgtgaagtccctcccggtacaaatggtggtgttaccgcaactggccttggagctggccttctgggttcgttcattgtttcagcgacatctgctgcggttctcccgttctgtgccagtgccggattgaaggatcgggctctgtggaccatagctatgactctctggggtacgctaggcagcgttcttgacagtgttctcggtggacttttgcaggccagtgttgtcgataaaaggagtgggaaggttgtagagggaagtggtggcaggaaggtgagttcacgattatgtgtccttgaccactctgtgcaaacatctaatctattttctaggttatcattcacccttcgacgggcaagccggttgttactgctgatagcactgccaaaactaccggtagcatacataatgctgcagtgcatggcacccaggtgacacacgtcctcgatgaaagtcatgaaagtcgtcgccttgaaactggtcatgactggctagacaacaatggcgtcaaccttctcatggctgcgactatgagtgtcggggctatgggtattgcacagtggttctgggggttggatgtgtttgagttgctcgtgtaaagtataacagacaatccaggtctcgaacatgcttattacgttcctgtttatgtttcgggttggttaagatcaaaattatgatgaatatatgtctttctctctttgtcttctgaatgtctctgctttgacaagcgtgggccagctttttgtttgtgctagctgcttccaacccaccaccttcccacctttccatttcgatgaactcagccggtatttgttttctttcccttccacttctcttttcctctttctgtgttcccttcgcgtctcaataacaacaccggccttatcaagaaaagccaacgtcaccttgcctcaaccgacacagctcatcacgtgttactgctggccctagttcatgggacccttccatgcatgtaccgagggttcataagctctatctcggatttggaaaactgaaaaccaacaaccttagcgcaaacagagcacgccagccaagatgtctactgaagaagaacgaggagtgcacgtccgagtcacaaagccaattgtctctttcctacccgagaccgaaacatccaagaccatagcatatgaccttcagcacagtgacttgcttcctgtgtatgactacgtctcctgggaatatttgatggccggcgtcgccgttgagaactcgtactgcacacgtcttcttcttcgtttccctgcagatcctgccagattctccggtctcgtcgtcgcggaaccatctcacctatggggtggaacaaccatctggcgtctcattaatcggtggctgatgcgcaatggtgagttatcattcgttatagtttggtgtgttgcccgagctaatactcgaaaggacacgcttggctggaaattgattcgcaagctcccgcggcacttgaccagatcaaaaacgttgatcccgaacgctacaaagacatgcactttatcccttgtcagaccttgaacgagttttccagcagcattccctccttcgataacgcagaagagctgtgggataattacaggatcttcaaggaaagatggtgggccgcaactaggcagtctccggagattcttgttgctgcatctcatgctttgagatctggacagctgggtatcaaggccgagcgcgtcatactaactggtctttcccagactgcagacttgatcagaaagttcatcctcgagtctcttcatctccgacttcctgatggatgtgccccatttgaggggtttatgccatgccaatgtgatgccggcaacccgctcccagacttgcacgatgcaaagatcattgaggttcttggtgagttcgagctaatttacatcaaggcactctacggcggaaagaaagagccttcccatcgtcgtgctgatagcaagtcattccgactctacgaagttgctggtatgtcgcatcgcgagacccgatatctctccatggccgataagaagcgtttgttggctgtggatctggaaggtgcccagtggagcactttcgcgaattctttcatttatcacgcactctttgatgctatggacaaatggattacgaccgatgttgctcccccacgaggtacaacaattgatatggacgaatccggggagattgagcgagaccagtacggaaatgcgcttgctggagtcagaactgttcatacagatgtgtctactgccaaaatcattgatgttacccctcagccacatcctcattggcacactggtaagtttctcacgtccgcgagaatctctttcaattgttctaacttggttataattgacaggcaccgaggtccctttcaaagatgtcaagttgtgggctgtttacaaaacggtagccaactatcggcgtcaggcgggcgaagccatcgagcgacagatcaaagctgggtttctgctgccggaagacgctgaagtcctgcgtcgcgatacgattgagcaagtttccttctaaacttgtcagactacagtacttgtttctcatcatggttctggagtgttatttggatcttggggcctgaagcttcttaggaacacagttgtgcaagccttatgtattatcggggtgcccttgattatgttggatggatttgagaattgtgcgcttctgcaatttcaatgtcttcagctaggccttgaatatctaccttcatgtcaatgtgcttcagttttgctatttaaatagtgataccgttcttcgttggtggagatgatttgcaaacccacatgaagatcccacgagacgcaaagccttgaatcggtttaatttgatctacaacgggctatatgcgagtggtatagagacggtagcaaaccccccttatttgggtcaggaatgggatttatatgagaaaatgtatgagcctaagcgcctaaactccgatttagaatgcacttcaagttctaggtgctgaacagtaatgatttcgctgatccctctgggtagtacaagtttcagcaatatgacatattcactaatacatatgcaatggctgtattccactagcccttggtctacattagcaaaaaagaacatccgataaagataattgaaacaaaatcctctgcagaattacaaaagcccaaccatagtgcccaaccatagtgtagatgttgagtggaacagtctgcagcacgcacctcgtggttagcaaagatgatatctaatctatttcactagaaggcataattacccgacagaaagcgtccactaagcctgtccatgtccaatcccttgctccatcacccccggtgttttgacatatgccggggcaggttgctggaccggggtgtatggcacccattgctgtacagggggtggttggaaggatttctccagttctctttctttcttcttgcgatcacggcgcatcttgatgagaaggataataacaacaacaatgacaatgatgataacgattgggatgagaatcgctttgagcaagagttttagaagacccataatgtaagattgcagtatgcgagtaggtggcagagcctggtataatatgatgtagaaaagatacaacttggatgggtgaatcgaggagacttttataccccgacctgctcacgccctgactctgtgtgactaggccacgtcgtatcaacgagggcatgggcgcaatctacatgagcataaggaatagcgcagcgctaaatggtgatatatggttggcggccagcctatgaatgtgctgaatttgatatggaagcacaagcagactttgttaggctgcatcagacgttgcaactgtgattgatcgtgcatgattgatgtttcagtatattttccaggtcatgccgttatgtctataaatggatttgttcgaactgtgtgactttgaacagcgtaagcaatagttcttgtatacagacaatacagacaataaaccaataattcgagcaaggaaaacaggagattaagcggaactctgctgcctggtccttttctctcggccgatcatccggccacaaattgattacattgctatggatatctacgtgatgctcgactttggtctgctgtttagagatagaaccctttagactaaggacttaataggcagaccttataaccttctccgtcagaatagatagcaagccaagttgattgaattgatcaaaacgattcaattgaaattagtccgttcatctagttacagcgccaagtctcagccctacgaggcgactccactatcgacggcgattcttgcctgtcctgtcactctaaatatagaactgcttctacatattgtacggtttttgagcggcagaaacctagacttatattttgtccgaatgtaatgtatgcaactaggaatcattaattcgtgaccctgcattctagacgaagggggcatcgactgcgtctgggtgcacgtagaatgcaattgcgattatcaaatacctaaatcattagcatcgagggtagccagaacactcatgggggcactcacgttccaactaatagagacccttcgtagtaattggatcgacctccgcgaatcaagcagtccatgacgatcaccgatagaaagaataccacagtttcgaagggactgtagcgcaaagacatgggctgcccaataaccaggccacatatgaccaggaacggactcacaaacaatgcaatctgcaatgtgcttcccacaataacaccaattgcgagatccatattccccttgatcgaagaattgacgacagtattgaattcacccgcgttaccgacaatgggaaccacgatcaggccaataaaagcccggctcacatgccacttgtctacgaagccatcgacgctgtccaccagacgatcggagcagacggtaaccccgagagttgcaaggatcaaaattatgcttgccgaccaggggcccagaactcgctcttcttcctcttctttttgatcgtcgacgaatagctcagcgtgactcttcaattgaaagtagagatagaccaggtagaatgtgagtaggaccacggaggcggcacgggagagactcaggacgctgacttccacttcgtgggacttggacggtatggttgaatagagcacggagggaatgatcaatgttgcagatgaaaccaccatcaaggatgatagtatcccactaacatccacgttgaacctcaccacatcttttgcatagccgccgcagaaaaatgaaacacctaggatctaaatttcgtgtaagcagacaagatcaccgggtagtgaatatgcaccaagacccagacctaccagtagatttcctgacaggatacttcccaccatactggactgcacgatgctgatttctccctgtcggaccgcagtgattcccacctgtgtagcgatcaacgtcagtttcccaccttaacagagaacaaaacgtcgaaacaatccaaccacttacaatcatttcaactgcatttccaaatgtcgcattgatcaaccctccaacggtttgcccgacgctttttgccagttcctctgtggcaaatgacagcaacgcagcgagaggaagaatcgccaggaagttgaacacgaaagaaatcgaatcaccccatccttggccccccgcaatgattcccagaaacacgaatggaagtagcaaattggtgtagctgcatcccagggtagctttaagcacacggaacagagagttgcctaggaaaagagcgcacttcgagacggggtggtttgtgtcacgcaactctgcagattcctccccgtggctttcgcattcagtctcgtctctaagtaatgcatcttgctcatgggctgtcgcgttggcttcaagcggtccggccatgatttcagggtcaatcttggttgactttcgcagtctagggtgagctgtgttgttcatattggcaggagtgaggaaaaagaccaagaaacatcgtggagaataaaagggatggtgtattgctccactgtctctcagccatagacatctgcgtacgggttagtgtaaccttacagataaaaatacatgtatgtttcagttaattacgtttatattacgtatttggctgtatcggtatggaaatattaatgtgatacactgagcctcatttgttgacctgtgtgggctttctcaagacgggtaaattctctcagcttcatcttttccctcgatgaatcatgtctcccaatcgagcttcacctatgctatacttcaattttatcatggcacaggtccagcaccacctgcgcctcttgtcacttttgatacctctcatcggtatcatagcaggagccctcaattggaacagtgttgctatcttcaccctcaacatcgtcgctgtgattccgcttggattatgggttaaccgatcagtcgattcgttgactgtaggtggcagccgagttgtcaatgaactgctgaaatcaacactgggaaattcggtggaattgatggtgatatctagccctgggggattcaagcttcaattcaaacatatgctaacgacgattgatccagatcggaattaatgcgatcgcgcaaaaaaaatcacacatctcccaatctgtgatacttggaagtgtcctgagcaatttactgctggtaataaatcccagtatcaaacccaacaactggtgccatgaacctccccctaatacaatctatatctacaggtcctcggtggcaccattttcgtctcaggatacgaccaaaaacgactccgatttgatcgtaccctcacaacaatcctctcatccctcatgatggtcgtcttcatcctcctcgccctcccaaccataatggaggtcttcccatctgccaaagccacccctgcagaccacatactcttaacgcaacgcatagcggccattatactcgtcatcctgctcctcacattcctcattttccgcctcggcacccatgcggccatgttcgctagcaccccattcagccagcgagctcaagcccacggcggccggtctcagataatcgaggcccagattccacagccgtatattggcaaggcttcagcatctatgattctagcagctgcatccgcgtccgcgcttgcgtgcacatattacatagtaggttgtttgggtggggttgcttcaatcacgggtatgaatcagtctttccttgccgtgacagttgttccactggtcggaaactcggttaagtaccgccgcattgtgatggggtcccggacttacaatcagatcgagcttggaatcagggcggttgttaacaatgtgttgcgggttacgatgcttattgctccgctactggttctcgttggttggggttttgaccagccgcttattctgagatttgatgggtttgaggctacaatgcttttgcttagtgttgtggtgatgacctatcttatttctgatgggcggagcaattacttcgaggggttgatgttgattggaacgtgagtcgctcgcactactttgatggactttgattcgtcggtattaactttactttctcttgatagatacatgattatcacgttctcgttctttgttaggcctgaggtgccggcgaatgtgatttacctaggtggttagcctggtatatcacacatgagtcgttacttgaagtggctgctggatgcggcaaatcccttgagccatctagtgtgcatagaacgccacaaccaaacttgaatagctataatcatacatcaataaaagtacttttaaaaatcagtaaggagtctagagaaacttacagagcaatcagcatcgcaccatggatgtaagcgtactgtccatcacgaagtagatgattaaccaccagaatggccaaaaacatggtcacggtctggaatgagtcgaagaaaagtgtcatcggttcagcaatgcaccagccgataaccaccaagaatggtatgacaaatagaccaatctgcaagagactgtcgatgataacgcggattgcagaatctgtatctcctgtgcgagatgccgcaatgacagtaaccccctcggtgctattgctagcgattggaataaagacaattgctatgaaaacttcagagactccaagcgtctgcgccatgttgtcaacactttcaagcaggagttctgtgcaaaagactgttgcggccacggctgttgtcaatcggataattgatgaagctaagctggctttgttggctgcggatgatgaaactccgttattttcatcgtcactagcttcgatctcgttcgaaaggaagagatgtttgtgagtaccgaggtagaagtaaaggtaacctccgtagagcgcgaggagtaccaatgatgttcctcgtgagaagtatagtactctgtcatcgatctcagatactgggaaagtcgaatacagagccgttggaagaagcatcgtgacggctgtgatcatcatcaaagaagacaaagtctttgcaagagcgctgttaaactccaaaacctccttgttgtacgaagctgtgacgaggcagcaaccgaatacctagattgagctgtcagtccggatgatatggccaacactgggactttcataatgtgaggacttacaagcaaaatatccgagagaatactgccaaccatcacagactgtgcaaatgggatctcgtcatgaatcagagctagaattcccgcctgggctgagtgagcattttgtcatttcgatattcagggcaatattgttactcaccgtgagctctactgtatttccgagtgtggcactgagtagtgcaccttgcagctctccaagatgcgcagtgagttcatctgatgaggtggatatcgcctcggacaagaagataatggcgaggatattcaccgtgaggactatgatcgggttccagtgaaatatctttgcaagcccagccagaggtagcagcaccattgctggccgtccatgattgatgctcagttccttcagtccattttgcgatggcatcttgaagaacctctggatgtgaatccaagggtcctggcgatggtggctaggcgctggctgagtgtctcggcgagataccatggtaaatcttggatctcttggattgttgaagcttaagtgagatgcgacccgcggactgggaaatcacatgaactggatatttccaagattgtgttccgaacgttaccacggtacaagtacgggtactagtaactttcagccttatcaaagttacagccctattactagcgccaaacggaacggtctccaccaggaagtgggcgatagggctgagccggtatttagccgctggatacttttcaatagctctgtatacaacttacagtatccaggcaacagcatttatttgatcttcgtctcagccttatgggatgttctgacgtgttaggctataaatactcgaaagatcatgtgcaatgacgtttaattacagggaaggggaacacaagtcttcgttgacccctctctgctgtgtattgtaattaatcggaacattcggggccccccacaccttggcaatgcgttcgcagctcacaattcttatcttcctctcaaagagtcgtcacgctcaacccatctagtgacaacccaacctccgacccgagtaaatgattaagagccagcctaccggatcattcacaccaaaacaacaaaacaacaaccggggccaggctggataatccttgctgtccgtgatctatggataatcatcctccctccctcgagtcgctccagagggaggttagtgaactcacagccatatatcatggccgaggctggacgaccgaagcaacagaactagagtcagcaatgaccacagcggggaaccggatactcgcgacacgtgcggattctgaagggatgaaaataatgctcgaagagctagccgcatgtgtcaagacattgctgcaggccaattcatggattgttgccgaagatctaggcattctggtgctggactcatgcgagaaacttaagggagagcaagacttaatgactatgacagcgatgcataatcttgcttcggcgtattggggccgaggccagctggatcaggctgctgctctcgcttcccgggtgaccaagttgagacagaagattcttggagaggagcatccccagacgttgacttccatgaccaatctagcttccacctatcggagccaaggcctctgggccgatgctcaagaacttgatttgagagtttttgagatgaagaagaagactatcggtctcaaacattcatccactttaggctcaatgtctaacctggcaatatcgtatgcctatctcggtcggtatgaagaggccgagacaattgcacgccaattggtcgatctcggagaaagtgaattatctccaaccgatgcctcgttgttaaaatggaaacttaccctggcatcgacctaccgagaccaggggaggttagactccgctgaaaagcttgaattggagattgtcgctgttagtcgggacatatttgggacgaatgatcactttaccttgacctctatggccaaccttgcatccacataccgcgaacaaggtcgatggtcggatgctgagcgcctggaaaaagaagtcgtggctagcagcgagaccgtgctcggcgaaacgcacccgcagaccctgatgtccattagcaaccttgcctcaacataccgcaatcagggtcggcttgaagaagccaaagacctcggggagaaagcaacgacagtaatgaaagaggtcctcggggaacgtcatccacacacactggttgctatggcggatcttgcagtgacattccaaatgatgaggcaatcaccagatgccgagatcctggcagcccggtcattacgtttgatgaaagagacgataggcaaagaccacccgtatacactcaacgcgatggccaatctgggcttcatataccagtcgcaaagcaagtgggacgtcgccggtggaatggccgaaactgtatattctcgcagggaaagagcattgggaacggaccacccagataccgtggcagcgctagaggatttgaggagaatagcgtgggtagaggcggcggatcagaattcacagcgtacgttgaattagactctcttttaggcttggactgtggagaggtgtcgactgtccccagcgccattagtctgtatctagctagtgtcagccaggtttggcgatttttaatcattttttctgggctcagtgaccaattgtcaagtcttgttgtctgccagtcagccagcctcgggcatttacatagcctccttgccaagacttgagactgtcaacaatcttcttgtgtgatctctggggctttgttttgggggagtacaataagcaacacagccctgtaagaaattcacttgcctgctctggggtggactttggttaattgtatggctaacgagttcagagcgcttgtccaacataggcatgactagttgagtcagaagaactaaaaaggaagacttcatattgatgacctataacgcacaaaataacatcaaaggaaggtaacgtgtcttccagatgtcgctgtaccggctccgatacatatctcttgcagaaataggtggatatcatgttatgatactgatatcttgtctcttggtatgcatgatacgccaactgtattttacaatccctttttacgtatttgtatttcgccagacaggtgcacctcctttctgattttgtccatctgatcctcccatgacattatccttgacatgacgccaatttcgggagccaggaggccttatatgtctcttttttggtcgcgaatagtaagttcaacgatgagcctgagaatgtgtcttactgacgatacccagaacccgcgatcaaaacgtgccacgaaacaattcactcaatcgttctcgacctttcccctggatcctgacacattaggcaatcttgtgttgtccaaagatgtccaagagttccatgctattggtggcgtaacaggcttggaggaaggactacgaaccgacgtccactccggtctgagcctggacgagacctacctaggtgctcccgcgaacatcgctgcgagtactataagcactgcgccgacagaaaagaccgctatctctgagcttcctatgtcgataaatcttcatcgcgacgcattcgtcgacagaaggaaattcttcggcgacaatcgcctacccataaaaccatccccgagctttctgtcattgatgtgggcagcctacaacgatcacgtcctattcctcctaaccggggctgctattatctcgcttgctttggggctgtatcagacattcggaaccaagcatactcccgacaacccgcccgttgaatgggtggagggggttgccatccttgtcgctatcgtcgtcattactctcgccggtgccgcgaacgactatcaaaaagagtgcaagtttcggaagctcaatagaaaacagcaagatcgcaatgtttgggttcttcgatctgcaaggattcatgaggttcccatctccgatgttgttgttggtgatattgttcacatcagtcctggggatatcgtacctgctgatggagtattaatacgaggtcatcaggtcaaatgcgatgagtcctcggcaactggcgagtctgatccggtcgataagacccccatagatacccgtcctggtggctctcgtgagatcgaccccttcatcctctctcataccaagatcgtggaaggcgttggtgcgtacctcgtcttggctacaggcacaaaatcaagctacggaagaatccttctctctctcgataccgacccaggcttcaccccgcttcaagtgcggctcagcaatcttgcaaagaatattgcccactttggtgcacttgcggcgcttgtgctgttcgtaatcttgttcatcaagttctgtgtcggccttcggaatagcaccgagtctgcctcggaaaaaggacaatctttcttgaatgtcttcattctggccttgaccgtcgttgtgatcgcagtccccgaaggacttcccttggcagttacactcgccttgtcatttgccactactcgaatgatgagagatcacaacttggttcgacaactccgagcatgcgaaacgatgggacaagccacggatatctgttcagataaaacgggaacgttaacacagaatcaaatgactgttgtctcgggtttcttcggtgttacctcgcaatttactgatcgagttagcagtccagatattttagatgaagaaagtaccttgtctgtggcaaaatgcatgaaccatctctcgagtcaatcgagatcgcttttgaggcaatctatcgcgattaactcgactgcaattgaaagccgatatggcggaggtcggcagtttcttggttcccaaacagaggccgccttattgagattctcccaggactatcttgagctaggtcagcttgaatttgatcgcgcgagtgaggaggttgtggatgttttaccttttgatgcttctcgcaaatacatgatcacagttgtgaaaatggccaacggggtatatcgatcatatgtgaaaggtgctcccgagattctcattgagaaatgtgtggccacgattgcacagccaatgcaagggcttagtactgctccaatcacggagtatggtattgaacaaatacgccagacaattgctcagtatgcgtcacgatctttgcgcacgattgcgatttgtttccgtgatgtagaggagttaccttccagagacgaggaagaaactgtcagcttcgaggatctgatgaaagagttcacatttctaggaattctgggtctacgagaccctctccgagccgatgcttggagtgctgtcgacaccagtcataaagcaggtctcactgtacgcatggttaccggtgacaaccttctaacagcaagggccatcgcagaagaatgtggaatcatcaatagtcctgatgatcttgtgatggaaggcgataagttccgtgcgctagatgaatcacagcagaaggagctagttccacggctcaaggttcttgctcggtctcgtccagacgataagcgggttctagtccaacgcctgaaggatctcgggagagtcgttgctgtcactggagacggtaccaatgatgcccctgcccttgcagttgctgatatcggattctcgatgggaatatctggcactgaaattgctcgtgaggcttcttctattgtcctgatggatgatacattttcttcgattgtcaaggctatcatgtggggaagagcagtcagcgatgcggtcaaaaaatttttgcaggtaagctactctatcaacaaggagtatggatggccatcggtctaatatccattttccagttccaaattaccattaccttcacctctgtgggcctggcatttgtctcggcagtagccaactcatcgcaggagtcggttttgacgccagtgcagctcatgtgggtaaacctttttcaagacactctagcagctctagccctggcaaccgatcctcctcctcgccggatccttgaccgcaaacccgaaccaacatctacgccgttaattactcctaccatgtggaagatgattattggccaatctgtgtatcagatggtagtaacactcgttctatactttgcgggctcttctatcttctcttatcacggtgcttttcaaacatcacaattacagactgctgttttcaacacctatgtctggatgcagatattcaacatgtacaagtatgtcgatgctaccttcaatatttttgcgttactaaccccaatacagcaatcgacaaattgagcgatcatttaatctcatcgaagggatccatcataactggctctttatagcaatcacctgcatcatgatgggcgctcagatcctaattatgtttgttggcgggcgggcattctcaattacaaagttgactggcgatcaatgggcatattctatcattctcggcgcaatatctattccagtcggattccttctgcaggttattcctaccgtgattgttgaaaaaccaatgacaggcatgaggatgctatgggacggcttgcggcgtcggtgatttccctttctctctttctttcttgatcattcacgcgagcgtctttgaatcttgcatggccatccagacggaatagccgtaaactgactcttgaatacccattcgtttctaggatccacttgctcaatatcgtagtcccttattagagttgccattagtttgagtagctcaaattgggcaagattgcggccggggcattggttgtacccagctccccactaatagatattttagttcatttcgtaaatgggtgttggcgttatcaattgcctacgtggattaaaaacgagtcgatataagttgtctctgcttgaagccagcggtctgggttgaagctgttgcagtcctcgccgaagatctgggggttgcgatgaaagacccacgtgttgatactgagaaccacctatagatagagtcagtattcaatcaaatatcaatcagtgtaggtaaagtaaagcctatgaagttatccttactccttggggaaaatatctgccagcaatagtcatcccaccttgtggcacgactcggggaagtccaccaacggcagcagagtggaaacggtacgtctctttcagctattcagagatataagcggagataattgaagtcgactgcttgcaagtggctacttacacaggcctgaagaaatggcaacctctgcgcttcattatactgcacgataggcgagagttcaccccgactctgggcagcatcaatctcatcgcgtaagcgctgcaaatattctggatgacggagtaggtaataaataaacgcctgggctgtggcaccaacagtatcggccccggccccgatattcgcaacagccgcggcaaagatctcattctcagccatgcgatcgggatatttggcccgaacgtccagccagcgctgcatcatatcattccttgttgcggggttattcttgcgcgcatcgatagcagcaagacaagtgtcgaagatatgcgatgaaggctggagtccaatgcggctcagaagcgggtttcccagtgtcaggttgtgtagccagatatagtggcccatgaccgcgatgtagactgccagggctttggtgtttgcgaccgcatctctgatatctgtgcctgtttctacgaatccaaaggattttgagaaggttacttcgcccagcacgtcaaaagcgaagaagctgaaccatttgtcaaattctactacctcgttgcatttgcttaatctgtcgaggtgcttttcgaagcagtggaggattgcgtccacgtgtggctcggacttgataatgtttgatagtgcaaagccggcggctatgttgcgcgacttttcaatatgccgctttggattcaattcagacatctggttcacgtaatggtagtctggaagactgaaaattgagtaccacgagcccttttgtgcatggttgttaatattgagtacttttgcttttgcgattgtcaagagaaatacatactttggctatatttgcatggagaagctgctttactgcgtctgggtgagagacactgacttcattctctgcaatgcgaacaaaataccctgtcgctcttgttaaaatatgaaatagaatcatgacagaccagcctaccattcttttggtgaaggtcaataagctcatcttcgatatggcccttccacaaatgataaacctgccatagtgtcgaaaaagaagccaaaaatgggcctggtatatctctgatcggggtccaatatttgcgagtgatcgctcgcacagtaaacaaaatgactgctaaaacccacagcttggacaaggtgatcaaggccgttaccccagacacaagtaaagaaaccatttcaattgacagtatctgatatacacgttccacacgtaggggatgaagttttatttccggggagattgttgggaatcattttaattaaacgtgcttttgacatgggtcggtcataacaaaagtccgttgctcatagcttcccctgagaacacaatccagtattctctgccgtctagtatcaacctaagctggaatagtgaaagtagaatgttttggcgttggccgtgcctagtccttgtggggccggccttgctagcggcgttgaggtggactcggaggaaggctgctagcacatatcggggatagtcctactatctcacgatggtctgatttgctgattaaatattgtgccgcgggggtcgcgggccggagatgagagtagaatccctccttgtttggcgagaatccttagacaagttggttgcagggtagttgaattgggggccaaagtctgccttgatgaatctattcacctcggtttcgtgttttaggaatgggatcaattcttcaaatattctcttgggcacgatgtcctcttctaaatacccatcgtcctttctggcggagaatcgccgccagccggcgattatcggcatggtcgttgtgacaacactctcattacttgtcgttctgattcgcctgtacgctcgggggcatctaatccatgagctgggatgggatgacctcacgattgcagtcgcacaggtaaatttgatccgatcactcgcgacctgttgcgggattttgatgtctatctagttagtcagctggatagtcctggggctttcattaatggtcatccactatggctctggccagcatctcgcagcgttgatgaacgacccagaagccctagtgcatatgtataagtggcttgtcggagctcagctcgtgtatatgttcaacatgtggctgtgccgcatctctggcatcgctttttatgctcgtctcaatcaaatgccacgattcaccctttatctgcgtatttccttcgcttttgtgacggctgtgtatgtagcgcagacactcatcattactttgcagtgtgttcctctcgctgttctgtggggcggcgcagagggtgaatgcatgggctcagagattgttttcatttcgacttctgtactcactatcgtctgtgactcgcttgtgctgctattgccaatgaatattgtcttctcgttgaaggcaaagctagcaagaaagctagtcttagcacttgtactttgcgtgggagttttgtaagttctcttgtccttgtcttcgtcaacagtgagaaagggaagtagctaatatctgtctctttagtgctgttgtgtaagtcttcgccgccttcccagtcacggtctattagctcaccgattataggacgtctattctccggatggtgtccatgatcgtcgccctccaacacccggatgatgcaacttggtatttctctgtggtgatggtgtggtctgccacagaaatcagtgccgctatcatcgctctttctctcccggcgttgcgggcatttttcggggtcttgagcagaaatcgttcgacgatgcatcacagtgactcagataatatagggacaataggccttgagtcgattcctctatcggcaagggagcctgtatctgacggacatgatgttcatgagacgacaatcgatgtggactgggggacgagtccgagtcaggagacgctttggggtgtcaaggatggagaatatggttcgcatgggcgttgagaggccccaccccggtagacgagcatagtggagtacctttgctccgtgtttactccatacctagttaatggtcaatccaaagaaaaattgtttccatgtggctgaattcatttgaagcgatgtcttggcattgtttccgcccattctttgatgatctggtgctgttgggtctgcccacttcttctgttgaggccaagaagttttgtatgggtcacttgcgaatgctttctgaacacatggctgtgttcctctcggtgaggcagcgtggcgaaaggcattgctgaggtcggccagctgatgtatccatttggagaactagattgaggcacaccacatcatacgagcgtcagagagcaactgccaagagaactatccctgcctagacagaaatgaggtagcttagacctgaaaagcttcctcggggatagattaatgcaattgattcgttctttcggcaaacctgatggtcatgcgagttaggctcaattgaccatatcggagaattgaacagatacgaacgcctttaaagagtggagcctatcattcgagaaatccctgcatgaccgtggagttatcgtatattactaatatcagacttccaaggtttagttctgtagttcgtggcagtgattacatgatgtacattgcacgtggggcaaatcgacctgttgcacatgagtttggctgtcttggctggcaaaaactctgaaaccaaccgcactaggagctcttccaacactttccaatcctccagggttcctctttcgtcaattagagtcacatcctacaaagtacgaaggcacgtgcgctcgcctcggagctcccgatgtagggcaaggcggtggtcgtcagctcggcacccgatgtcttctagaacaaacatgaaccatgcgacagacacattccgggggattggacctcttatacacccacgtgtgggattgcagtgctctcataggtagatgcggaccgtgcgcccccacccccgccaagagccgcaaccgtccaatggccgtgtcctggaaccaatcaggggccgtctccaccgagttctaaaccaatctacacctaatctggctccttttcgtcgcatgtcaatgtaaaactacttccgccgagatattgccaagacattgtccaatttgcttcagaccataagcttgcggaaaacgggctttcttcttcttggcttggtcgcgttgcatttactttttgccaaggccacagacgatgattgctaggctcccattgcagcacgtgtggccggagtgtcccaatcgggaagttctcctgggcagaggacgttcgccacaaagccttgtcttgcatagagagtagagcggttgtgtcttatcttcccatgcatacataaagggcagccttttcgcccaggtcttggtttctcttgtttctcagatcaaaagtccgtccagtactaagctttgaatcgaaagcttgacttgatacaactcatcaagatgtatctccatcaatacgattacatctttgccatcggcacgttgtttgctatgcttgatgcattcaacaacggtgcaagtaagtagcagcctatccttggatggttgacctcgaactaaccattggatgtctatagacgatgttgccaattcttgggccacgagtgtctcctcccggtccatctcctaccgccaggctatggtcctcggtaccatcttcgagtttgtcggagctgtcgctgtcggtgcccgtaccgctgatactatcaagaacggcatcatccccaactcggccttcaagggcaatgccggtgttcaaatgctcgccttcacatgtgcccttgccgctgcatcctcatgggtgatgtggtgtaccaagcactccgcccacgtctcctccacctactccctcatctctgctgtcgccggtgtcggtgttgcaactgttggcgcttcccaggtccagtggggctggaacgatggcaagggtctcggtgccatcttcgctggtctcggcatggctcctgtcatttccggttgctttggcgctattatcttcatgctgatcaagtacgtcgtgcatgtgcggagaaaccctatcccctgggccgtgtggagtgctcctttcttcttcctggttgctgccaccatttgcacgctctccattgtttacaagggctctcccagcctgggtctgagcaagaagcccgcctggtacgttgccgccgtcactatgggcactggtggtggtgtctgccttttgtctgctttcttctttgttcctttcattcactcccgcgtgatcaagaaggaccctagtgtgaagtggtggatggtcatccagggccctctgctcttcacccgtcccgtccctaacggtgctgaagttgccaaggttcccaactacgccgtggtgcaagaggaacccgaggagcacgagtctcacctgcctatcgatgagaaggatcccaagaccggtgtttcctccatcccaggctccacggaggagcgatccattgaaaagctcgaggccaatcagctcacctaccgcgaagtcatggcccaatccgaagagcgtcacaaggccaagctcctccagagccgtggtcctattggctgggctatgcgccttctccgcgacaaccccatgggcgctggtgagatttacgaactccgcaatttgaagtgcatggccaagcgcatccccgccatcatcactgtcggtcttctctatggtttctactacgacatccacactgcccagagtggtaacgagggtactccggagggtgagcgtatgaagcgtgtctatgccaacgccgagaaataccccaatgaggtcgaacacaccttctccttcatccagatcatcactgcttgcactgcttccttcgctcacggcgccaacgatatcggtaactctgtcggcccctgggctgccatctactctgcctggtccagcggtactcctgccgcgtccaagtcccccgtgcctgtctggcagcttgctgttctagccatttgcatttccatcggtctttgcacttatggatataacatcatgaaaggtaagcacctcttccttccacattccaatcttcatttttactaactttaaacttagtcatgggtaacaagatcacctaccactccccgtcccgtggctcctccatggagatgggcgctgccatcacggtgctggtcttctcgcagtactccctgcccgtttccacttctatgtgcatcactggcgctaccgtcggtgttggactatgcaacggaacttacaaggccgtcaactggcagcgtgtcttccttttgttgttcgcatggatcatgaccatccccatcgctggtacccttggcggatgcttgatgggattggtcctcaacgctccccatttccttgtttagacaattggctttttggtccaatcgtgaatattttcgagaacgcacatattttacttaattcttcttttgaaataccactttttagagcactcggacaagaagatttaccagaagagtcaaactatttttggaatagaaaagctttcaattgaaataaatgataatgacttctacctaacctcttcacttttcaccattaggataaaaatagaaatgagagcgagtggcttgcctctgagttttaattgaaaaaagacaaaaaatagtttccctgggaatcgaacccagaacctttccggaacatatgctagtcgcatttgttaacggaaaatcataaccgctagaccaggaaactgctcggccacttgggccaattgatgaatggacaggccattattggcctcatgagtctacaactttgttcccaattatttaggtccggagtaacagaacgaacttgtttcgccaaccttccaacattcgaaagtgggcaatactcaatccacagcggcgagactctcaatggttcttaatacaatggaagttacatccatctttggttttatgactgactcttcatttgatttatctcatctccgacaacttagggtttccaagggatattcttttgttagtttgatgttaattgtacgaattcttcaatatttcattaagaataactaatttattcaacaccatgatacctaaatcgaacgagaaaagaagaaaaaaacttgaacaacacagatacatatcttctcaaacgcagttgcatatcctggctccgtgatatgcgattctcaaacaatccccatctcttcagcgaccttggccaactcatgtctttctctgcacaagtactcgtaagtgacaatcttattgcgagcatcctcttcgatggatttccattcctcgggagaaatggtaatttcgccatgttgctttggaaaaatggtcattgggcggcagcgttttgctaggccgaccttgaaaaacccgagccggaactgggtctgctttgtcggttcgtgaggaactccaaatacaaatggttctttcggacgcttgtagggttctccgttgactactgacgtaaggcccatctggaaacattcttgtctgaaccggtcccgagccgatcccggcttgggcatttcgtacgcagcttgatcactgggaaccttggttgggactgcgggagctgtgcccgggatcgggagctctgatggctgggtttcagctggggcgtccggagagtctgctgcgtgttcatctgtgttgtcacccgtggtgtcatctgtgaagtctctagagcctctgccaagatcgtcgtcggattcatcctcggtgtcggtatcggtgtcatccgaagaatcgccccaagactcgtacccaagctcttctgcaaggaccattccgaggacctgatcttgggaagatttctcgttatccaacacttgctgcagaagctccttgtccaccttccagtgaatcggcatcttacaccagggcttcctgattttgccaagtggacgttgcctaaccaaaggtagctgtagtttgacgagagcccccttccaagttctcaacggtcgtttgcgtttgtcttcggtcgagacagagttgttcgcagtcttgtcgaatttcgcgtgtgccgctatagccttatcatgagcacgttgtctctcagcccgggtctgctcatcaattccatgcctggtgacatccaggaagaagctcaggtcctggcattcgacgccctccttcgggtccatggcacaagggttcgctttcacgaagtgctcatgagctttgcgcatgtttccgcgcagaaactcgacccgacccatccagaactcacacctggcaatgaggagggaattttcggatttgtttgcggattgcctggcgaacttgaccatcacctcagcctcagaggggtcttcatggatgatgaagttcgaagctggcaagagataagagccgacctcgacccgatagtacatatgtaacaaatcgttgttagtcagattgctggaattgctgttgattttttttgcaagaaccctgagcctgtttgtttcttctcgtatagcgcgggcttccagtgtgaggtcttgctctccccgagaatcgagtggtgtggtctgccgggagctaccatcatttctcgtgtggggtatgttgtgggacatggtcgaagtactatcttgccccaatagggtcctggattaatcttggtaaattgtgaagtaaatttgatgggattgccgtttgtcttgcgaagatccaaaaattcgcgtcagatagaagagatacgatagaagaaaatattggtagttcgttggtgaaggaaaatagcaaccgagaagagaagcagtggccttatgtacctcacaggcgtgttgaaaagaaagaaaacaaacgcgttgaaaatggtccgacctagacagttacaaacaaaggcatttgtttacaaggagactttggtgtcctttcctttgtttctatcaatcccattgttgatcgcgctggaaccaagacgccacattctatcatacccttcactttgtgtatattttggcttgatatgtacaagttaagtaataaataaatatcattttcatggctgtttatgtagcactaagtattctccaccctatactagaggtgctgtactggttcagtcaatatatacacactggatacaactatgacagttactttaatggggttggcaaataatatagataaatttaacctactacaatttactcgaaacggaaatacaaactgtggagttttggtttattggatttctttctcaagcaatattcatcagtttgaagacatcacaacgagatattcctataaggaatgatcattattttgtcacctattcaaggataatcaacccagattcgtctcgaagggccaatcccgaagttaaagaatgagtgacccctcaagtagcccacttttcaacccgattcacaatctatatctggacactggccgaactgcttattgcaagagtcatgtatcaatgaatgaactggaggaaataccaaagtagccacatcaggccaataaacagtgcttttgaagtcggctgtattttcaacgttgtttaccatcctcccaatctaataatgcgtgggtagacgctgccggtgagtgatcaaactcagcagcctctattcgagtaaacccaatgacagcctccctttgaatctcacgggccttttcgctatagcctggtattacttgtgcccgcgaaagcgacagataagcatccgggaatctatgaagtttcatgaggttcattcctttgataaaatgagtaatgcaggcgataattcgagattctgggttgttcaagacggcataacaattgttcatttgcacaaccatctctaggctcatcgtggattctttgaattggcaaagatggtgttggacagcagcaatgaaaagtcgacatcgcatctcatcaagttcgcataaaaaagggttatctctgatgacctgcgaggcaagctccattgcaagctctgggtcatcatgtcgccaccgctcttctgcatctaccagtaatgagccactgtaggagcagagccagatatcatccatagatgtacgcgttattcctgtgggcgaaattgttctaggaatgtcagacagagactgggaatcagattgaagaggaggaacagcgagagtggggttacttgaggtggtgtgtgccagcatgaaatcggactctatgagccgcaactgaagatcgtatactgcatcgaaggctcgacacaattcttgttctagttcggcaagttgggaacgtcgggaacgtcgggactggaagcgcttgcgcaaacgtcggaagatattagccattttggagtggaaacgtcttttgatgctctcaagctgatgaatactttgagataattctttcggggtttatatacttgtccatcgagcagtttccgggatggcttctagaggacaaccgcccatactgatgaaagagatcattgtttctttgagcgcaatcatattgtactacctgagtcagaaacattgtttggaacacgctttgtcccaactaaatatagactaacatctcgaagccgaaacggcgaaaccaatgatgtgactctgtgccaccatgtggttgagtttgtcgcctgatttctagggcaacaatgtgcaaaccaagcaaacattgcaaacggacaaacatagcaaacacaaacagagcaaacttgacaaatgcgacaaacatccacctatgacatcatctgcccgttgctccccaccttcgtactccatacctacagcacgtcgcctcgcaagatgcaaccacaaagtggaagagcaactgcgggccaatgagctattttgggtatttcccgtgctggccgcagtgcccaaccggtaggaaatacccaaatttgtttagcggcagagcgtgccagtcaaattagtagtattcttccgacgcggatgtaaatggcattcgtaggtgcgtgaattgtttgaccaatctgacctatctaattcaatctgtccaatcctatcctatagatatattaccgcaaaatccacttaccggatcagcccatggatctagacttgggtaggagttgtgttgcaaacacgttcagcaagacaaatccgggttggagactaatctgttccttgaattgatttataaagcctgcatagtgcccccctatagtttgtagttacttccttccttattttactactcttttgtaggccaaatcgtcatataacaacccgtggaccttacccgatctttccgttctctaataatttgtcatagagagttagtttgccaggtacgccgatttgatcccttgatttttttttaaaattttgatgcctgaactgacatccatgcagtcatgtctcctaccttgctcagaaacgtcgacacggttgaaattgtgaacatccaccaggatgacatggaattctcgctggtggatgagatctacaagagcctggacccaccaaaaggcaaaccgcgctcattccctacgcttctactctacgacaccaaaggattgaagctcttcgaggatatcacctatttggatgaatactatcttaccaacacggagattgaaatcctgacaaaacatgcgaagaggatagttgcacgcattccggagaatgcccagctggtggagctgggaagtgggtcggtgacaccccacatctccatccgtcgcctcgcgcggcttggtgatcttgatctttggcccaagttctgacgatcttctttttttagaaacctgcgcaaggtcgagattctacttcgagaatgcgaacgggttgaaaagaaagtggattactatgccttagacctctcattgggggagctgaagcgaacattctcagaaatttcgcccgagagcttcactcatgtaggattccatggtcttcatggaacctacgatgatggtctcgactggctgaaaatcccagagaaccgcaagcgcccgacggtagtcttgtcgataggctcatctatgggcaattttagtcctccgggtgctgcggaatttcttggtaatttttccaagcaattgaacccgtccgatttcatgcttattggattggatgcatgcaagaacccggagaaagtgtttaatgcctataacgatgccaaaggtgttacccgccaattctatgagaatggcctcctgcatgccaatagggttcttggcttccaggccttcaaggctggtgaatgggaggtcttgactacgtatgatccccgtggaggacggcatcaagccttttatgctccgaaagttgatgtggtcatcaatgggatcaagattgccaagggagagaagctggtatgcgaagaggcatggaagtacggtcgcaaggaacgggatgagctgtggcgcaaggcgaacctcatttccgaggtcgaatttggaaattcgacagaagattattgtgagccctcatgttctgctcgaattgtaattgcacatttgttgactttgaacagaccttcatctgttatcacctgctgcgcttcatatctctatgaacccttccaagtatgcagctcagccgatcccgagtatcggaaattttcaatctctgtggattgcatgggatctcgcgaccagaaccatggtccctcgcgaggagcttctgtctaaaccgatcaaactccggaaagcactgatcttttatattgggcacattccgacattttttggtgtgtctccaatgttcaatgttgcttgccatgttcactgctaattatgctgaaacttagatactcacctaacgcgggctttgcaggagaaatctgttcagcccagtcattataagcggattttcgagcgtggtattgacccggatgtggaagatccaagccaatgccatgtccacagcgaaacacctgatgagtggccgccattggacgaaattctcgactaccaagagaaagtgcggactcgtgcacttacaatcttacaagagggatatgcgtcgcaagaccgcgctgttggagaggctctttggattggatatgagcacgaagcaatgcatctcgagactttcctctacatgctaattcagagcgataaaactcttcctcccacaggagtggatcgcccgaatttcgagcaaatcagtctccaggcaaagagaaacgaaacgccaaacaaatggttcaccattccacaacagactatcgaaattggattggatgactccgacgatgaagttgtaccaaataaatcttttggatgggacaacgagaagcctcaaagaaaagccaccgtgcatgcctttgaagctcaggcgagacccatcaccaatggcgaatatgccaaatacatacaggataattgtattcaaacataccctgcatcttgggtatttaaccagggccaagacaatcccatttccaagggtgtcggttcctcaggcgcccaggccgggtcgagctccagtcctgcaggattctctctggaggacgtcacggttcgaaccgtcttcggacctgtggctctaaaatttgcacaagactggcccttggttgcttcctatgatgaagtggccagctatgcaaagtacatgaaatgcaggatccccacgtttgaagagaccaggagcatatatcactacgcagaccaactcaaggctgatagagttacaaatggccacgggtatgaaaacaatcatagctatgatatagcaggaactaacttataaaataggaatggggtaaacgggcttgataatggtagcaagccccactctactgatcagactattttccgtgatctcaccggttgcaatgttggctttcaaaactggcaccctgttcctgtcacaccgaatggcgatcggttagctggtcagagtgaaatgggaggtgtttgggaatggactagcacgcccttgaagccgcacgacggcttcaaatctatggatatttaccctggatacacaggtaagtgatacttgagcatccccaccgaacccaagcttatttgcctcgatagcggacttctttgatggaaaacacaatatcgttctcgggggctcctgggcaactctgcctcgcattgctggccggactactttgtgagtataaaccctatgagattcaaaatggatcaactaacacattttagtgtcaactggtatcagcataactaccgttatacatgggcgggtgcacgtctagttagagatctatagatagagcttgaacaatgccattgagccctccagtgctcaatgaggatgacctcattctcgcgataagagataaacagtggggagcgtaacgtgactgcccctccttccccaacatcatctccaattccatgtcttctcttcattctagttgaattgtaaataccttacatgatgtcgctcgaaactattacaactatctccccggccaccaatgagcctgtcatcactcgtaccggtgtctcatcggaggacttgaaacagatccccgtggccgctcaagcagctttccggtcattctcacaatccacaactttggaacaaaggcagaaaattgtggaacgtgctcttgacatcttggagaaaaagcaggatgaattggcacgtgaggtcactgagcagatgggccggcctatcgcctatactggtggtgaaattgcgaccgccatcaagcgcagtcgttacttgacccgcattagcacatccgtactaggcgagcaaggagttgtgcctggggaggaggagaagggattcagacggtatattaagcgttcacctgtcggcgtggtgctgattatcttcccctggaacgtgagttcaagtcgtcgagatattgatatacctacagactgctgataagtacatagtacccctacctcacccttgtcaacagcttgattccagccattctcgctggaaacgctgttgtcctcaagccttctccccagactccaacaatcgccgagcaatttgcctctgcttttgcggtggccggtcttcctgaaaatgtgcttcaattcttccactgcggatctttcacatttatcgagaccttggtgcgatccccactggtgaaccatatctgtttcacgggttctgaagctggtggcctgttagtgcaaaaggcagcctccgatcggattgtgaatgttggtctagaacttggcggcaaggacccggcctacgtgcgggacgatgtagatcttgcctgggccgctgaggaaatcgtggatggtgctatcttcaatagtggacagagctgttgcgcgatcgagcgtgtttatgtccacgagaagatctatgatggtttcattgctgaggtgaagaaggtcctgagcaactaccgtgttggcgagccttctgatcccaagacccaaattggtcctgttgtctctcagcgtgcgaaggaggccgttctcgcgcaaatcgaggacgccgtgcagaagggggcgaagaacgagactcctgccaatgagacctttgagaacttccctccgaatggaaattatgtcaagcccacgttgctgaccggcgttaatcatgatatggccgtgatgaaggatgaaacctttgggcctgtgattcctgtaatgaaggtctcggatgacgacgaggccattcgtctgatgaatgatagcgacttcggtcttaccgccagtgtttggagcaaggatgttgcggcggccgagaagctggttgagcatgttgaagctggcactgtctttgtcaaccgatctgactaccctagtcccgtaagtgcaactcttagcatatatattattgtcccccctttgctaaccaaagtaccctacaggatctcgcttggacaggctggaagaactctggtcgcggtgtcaccctcagtcgattcggatttgagcagtttgtcaaactgaagagccaccacatcaaggattaccctaaataaacatgtgcatgtgagataattacattttggtcaggcgtataaatttcaccacgtagaccacgactcagaatcaagagtactattctcaacgaatcgacaatttcttttctccagccatgcccaggtgcggattagaggagtatgaaaaaaaaagaaacagacttatcttttgcgaccgcaagagcctcaacaacctcgctttttgcagtgagatcccaggctcactatctatatactggcaagcgtgctcttcaatggtactacatcttgctcatagaatattttgaagggtttcatgacccacttgagtaaattgttggaaagccggcttgtaattgttcaccaaattcttagaacatcgagattttacttctaccttattttctcgtctctaatatgagactaaagctacgctctgcctgtccatgtaacgggcttttgtcggctatttgagtttgtttcaggcaggtgctaaaaatacaactgccaactgtcaactgccgaggttgtagttgactcacctctcacccggcggcgtattgcgaggatcaacaaaagctcgatcaactctctaggccctcgtcatgatgtcaatcccattgtcggaggaaaacccctttcaatccttgattgccgaggcaaacgacgattcggtgggtggatgcgagaattatgaaactatcagatgtttaaccctttttgatctaataataggcaataatacaatctcgatacgagaaccaccgagtggctcgcaatagccagcaaagtgcacaaattctagccgacagctttccaggctggtcccttgacgagattttgaagcgacttgatggccctgagaaggaagacggatttgctgatcctcgaaactgtcttgtcatttgggccagaccatcgcctcaagtctgcgacatgatacgctttattcagaatgagttgaagagcatttctccttgtaagttcaccaatatagaattccctggcgcgggatttcctttttagcccttcatttcgctaacatgagtggtcatagcactctggttgatgccaccttcaaaccttcacataactgtcttggaagccgctcattccctgacggaagaacaaatcgaagaacttgttcagacactcctgtcatccaaggatgtcacgcctgcggatattgcggcatatccacgcagccaccccacgcgtctcatcaagcctatgataagctttgattctgccgcactagcgctcagctttgttccggctgctagtgagtgcctagaaacagaacctagtagcgataacgagcactacacataccatcatcttcgccgtgatgtatttgacatggtccgacaagccaaggtccctgttgcttcgcgttatatcgttccctccgcacatctcaccatcgcaaggttcatctcccaggatgggtttctagtcaggggatcagatggcgcagagacggtggaccattcgcgagtcaagctgttgattgataaaattgatgagattaaccagaggttgaaaaatgagtattggcccaaggagggtgcggatgcggtcagggacgggggtgaatggattgttgggcaagagggtctagtcattcggagaggccgtctttggtatggagggggtgaggatgtgccacttgactagatctttgcgttggaagattgagctctgcctattctcctagactagaagggttttgcatgttgactatgcgtaccgaattccttaactagaccttcctctacgagtcgtgctaccgtttgccaacttacgtgtcgagcataatcatgaactatcgcttggtgtatggacgatgaaaagatccacataagatatatttagcaggcgggtgagcgccattgcagagtcgtatgtcgcaactatcagtttctgtgcttgaaagcctgagctcaacccacgcgatgtcacgtgctagtacaattcctcaaaatggcgcaaaagaagcaatgcaaatgtattttaatgatagattactatatcagatggtagatattcaatcataaattccaataacatctactgaaatcaaataagtcgaccttggtgagcgtcaaatagcatttaagcttggtcccactctgctttgccctataaagcacattggttcaaaaattacaacgcggccggctggcccaatggcaaggcgcttgactacgaatcaagagattgcaggttcgatccctgcgtcggtcatctctttttgtttcttatttttttgctgtttgagatttaagagtttctgctacaataattgttatagtggttaatatttcaatccacgagtttgggaaactggaagataccagttgaattgcagagtctaagtagattgataactctgctttaggcaagcccgagaatacagtagactgggtgatttggtccaatgtgatcatttctagttcaggtgatcgaacaatgagcgatgcatttgttagatctatgagcgcacccccgaacctgtttattataagaaaaaaaatatatcagaagataaaagcaacataccgggaatcatttgacaagaatttcaaactcggatctgtaatattggcttttgggttggaaagtagccattctggtattgcgtgcggatcgaagaaggcaaggatattcagcagtattttcccttcgatggacagggatcgagaggaagccttgcaactcgttgacccatcttcatattgcgaagacatagtttatatggcgaatatattctcagtaggtttttttatagacaagcaaaccacataggaatagctacggtcatttgggaataggcaaaaccgtctcaactggccggcaaaatgcggagttaatcttggtatctcggtatgtatctctggccctaatccttgtcgacttctcgcgttcgtataatggaggaaaacaggagatggattcctatggacaccggatcatgttctgctcatcacacaaattatgaatcgtccctcactgcatgaagctcagcattgtggaaggttaagcgcccgccaaggccaattaagtgagcgttttatgtcgacctacatgatacgttgcccaagtcatatatataatgaacaccgaaaaccttccaaccatagtcgattgcattacttccatttccaatcagacaaacctaataaaatccgacctacgacgtttcctccgttaaacacgagacaataagcttccaaatcagatcgccaagccacgtacactcaattaagaaaggctcggtccgtcatagcacgctatttcatatcaaccaataagctttcttcttatttgctccacatagtatacgcgcccacaatgtactgaaagctgaaagctgaaacagtcatgaaggggttaatgcggctgggtaattttagtggcggagatgaaagcgataggacaaatgcgatcctggtcaatattaatcctatactatccggcagcagtcaagcaacggattagcgttttcatttcctataataacgccatactatggtttccaacaaagccagttagtagcacagcagcctattcatctacaaagaatgtttattaagtgacttacaggaaaccaacgagcccataagatttctatctctagagcgtttttggtttttgctaaggactcccacaatgacctacgaaaaatacaacctcgggtcaaactacgaaggacacataccacgcatattagcatcgatatgagctggtacgacccatggctatttcaacagctgcagaatttacctcacagccttgtgcaactccgagttggaacatgcaaaattcaagacaagcagagcctaaaaactctttttgagggcattgaagaatactgcgcacgggaaactgaggcggtctctattgatgaaatcactgcatacttacgagaaactggagtcttcgatcacacaaaggcgctgcacggccatcaaacgcttcttgtctttgccgctcttggttggcgttctatgttgtaccaagctgctttcaacgtctgctcaatgcaagaattagctatccatgaagactccgaccagccacagtcaggtcttgtttttgatatgtataaaatcccggctgaactgtccgaccgcccgatttctgttctactcaaagcttttgggcaccttttaccagcgcgatcctcgaattctcgctatcttgcaagcgaggttggtgggatagcatctatttggcagcccttgaatcccgaagagaccaatgcatatctacttcatgttttgcttcgtgttcaaattcgatgggtcgatactctatcactgcaccttgactatgacaaaagcactaagaccttatgcctcttcagatatccgtcattttgtcttgaaatgcttcgatcccacgggttgatctactctttttctagcaatgaaagcttctcaggggatcctcgttcaaacgaagaagaaatttcgctatttctgcaagaggtgcttttatcctatcgtcttctttttgcccagtcggccccatcgaggaaactctttcgccaaatatatacgatgtcggatttgcagagctacccgacagattccttactttttcagttgtgcacccagaagcggattgcgttgacaatgctcccaacagacaagccaatctatttcgctgcccgagactttcccgtgctgtatgacaggatcgagctcatggctaatgatctcaaggatgcaagaccaagctcaatcttcagtctgatgaaagacagacgtgatactttgacgtactggacattttggcttgtggctatgttcggcggcattagcattcttttgactttggttcaagttatcttacagggcgtgtcaatgatgtaggccctattgaatgaataatcaagcatcgagctatttcaagggtatctagtatgaaagtgaattcatacttcgcaagtcgtcacatggccattaaatcgggcagaccttgtgttgtttgaaggggttgtctttccttcatccatctcagtcaactgttcatttcctttcgtgtcttctggagaatccgaccctcggcaaccaagtacttcggtcatgtgatcgaaattatactaccccgctcctaacaatgtccttactctgaccctcctccattattctatcatacagaaggaatatccaacatgtcgattacccatatcgttcttttccagttcaagccggaagtagccgctgaggttgtccacgatgtacgttttttaccaaaattatcacagatgaacttgactgtgtactataaacccttaatggatgttgacaagtacctcaaaaggcctgtgagcgtatgctaggtctcaaggatagttgcgttcatcccacctcccagaagccctatatcaaatcggcgtctggcgggaaggataactcttccgaaggtatccaagtaagttccctgggatcccagaggacgaactctgaggatatcttactaatgcatgatagaatggcattacacacgcatttgtcgtagagtttgcgagtgctgcagatagagactattatgtacaaagcgatccctctcatctggccttcgttaaaactcttggtgggatcatcgagaaagcacaagtcattgacttcactaatggagttctctgaggttctcagtgactgcttcaagtgtccacatatctgattttatgggacatatagatactgtgaaagaatagaccgcatgttatattcgttcgcaatcatatatacgctaccaattatttcatgcagcagcctagggacttctagtacagattatatatcagcagctaaagctttctaacttggctatatgccttgcactaatccaaaacttggtatttgggcagacctatattttaagattattaacatactcatgaccgctcacccatagcacagacaaatccagagcatttgtgggttgatccgcagagtgcaaatatttctgtgtacaaacgtccaacaagaatggatcctcagcgcaaggaataatatctcccggcaaaatagtaaggctcttctagatctagagtttaatgaccaggaatgtaagccaagctcgaggttcgcgaagcactctgtcggagctagccgatgcgccaataatatcttgttctcagataggcaccgggttttctagctgaaaactctagatctagaagagccttgcattgcgaggactgtaagcataccaaatccgagcttagtacccatgggtttaacgtttaccagaattgtagttatacgttggatacctgaagacaataagattcaatagatgtttagattgagttctcgtaaatatatcatcgagcgtatttcaaaacttcaagaattcctcatccctgcggtttcggtaagttagggctctactctgttttctcggtgaaacaacctacaacaattatacctgacatagagaaattagagtaaaagatagcttgggtcagttcttctgctgtcttccatcttacaattgatgatatgaatgagcactgcgtgaaacctttgtgagctgttctttgactcggcattgctccgaagcaagggagaagcgagataaaaaaacgcgccaaccattcccgagcctcgcagccacccgcaaggtcttttatttcgattgaatagcggaacgggaaacgggaaaccgaatggagaaatttgccttgtttcggaatggccaatgtggctggaacattggggtgatgttctcattgtgaaaggtcttaaaattgccttcattgtctttgagcctgtgtatacacttgacctccaagaggactaccgaataaaccgcggtagatatgaacacatagttatctaacgcgaacaatggctcaacccgcaggatcacccctgtcagtgataaattcgtaatcgatcgacacggctacgaagctaatgatcgacgatgcatcctaaaattggttgccgagaaccgggtcttatgaacgcccgatttccgagacaaagacaaagaaaacgaggcaaagaaacattttaattgagctggtgagcttgcatggaaaagaagaaaaacctattatccccagacctaggaacaaggaatcccgagcttccaagaccctcacagggttcattcatgcacatatccgactcggcaaacggagatttcagggatcggcggctagttagtattattgaaatgtcgtgtacagaaaaaaaaaaaaaaaccaaaaagaaccgaatagacaaaactttaaagaaagataagtctctaatccaaaagtggaaaaggagacacgaagaatgagagggatatgtttcgccagcacacgaggttttctctgcttcttctcccttttacccctttggtctgggctgctttgcacttgatccactgaggggcgaatacctaatctgcatgggtctctaacgccagcatatcttccctgcaggctgcaggtcatggctgccgcttgtaatgcccatctatattgcgtccgatgagttgcagcagatcgtgggtgagagatagatacccgtagaagcgagatcgcctcgggggatagacacttgaactctcaagagccggaataggtcaaagggacttcaagcattcggaactctctgcgcaaagccaatccgatgcaagacaggctccccagggaggacccactgccgccgccagggagcgaactgccagattggagtcctgccgagcctgtcattctctccatgccagacggtggtcgcctagttcaaccggggtgagactgtggatcggttcgtccttgacacgccgagaatagcatagatgtgcataactccatactaatatatgtgctctcgcccgccggttctttgactctctttcattctctaagcacacctcaatggtgtaaagcggttgcaacctttttcttttttattctaattttctttgggtgttgtcatccctagtctctcgtttcgctttgtcactcgttgtatagtatttgttgcacctccaagcgtcgcctttattcctttcattgccttattcgcatccaaggacatcctagctggaatcgccattgttgcaagtccccgcgaatcgcctagcactttataagagctccttatccgccgaccggatcaaatcgaaacaccatcaatccaacatggaatgctttcgccaaattttccggtgcctaaaggcacctttcaaacgcgacaagggaagaattattgaaattgtaagtcgagtcgaagaccggggaatcgttcgtcattgcaaagacggtcgctaacaagtttatgaaacagggtcctcccactaatttccgaaaagaagaattgcctgcttatttttctgatgccgagtcagttctctcgcccagccaagatccagcggaacgatcaaatctgaccaatcaatcacaggacgcttacgtccgaggacagccgcatagcgaccgtggagaaggacgaaacaacgatcgagatgctatcgctaccatcgtcgacgaagagcaagatgcgggcccatgttcgaagaatgagcgtgagactatccgagagcgcgtgaagttatcccgatggtggaaatcaagcccagcttcagatcataaaactaaggccccggctgaatcgatcaagatggaggaaatgcgaaacgccgatttggcgtgttcatagggaaattgtgcattggtatatggatggtcacaccaagaaggtgggcacttcggtgtgccgggatctttttgcatctaaattgttccctccgcctgttacaggcgattgtcttgcaggagattccttggacttgtcagatatagagtaatttatccgagatgactctggtagttcatcgaggtcatcgaaaagcgattgaacccgtgatttatacgcgttcgctggactgggtcgcccatgtgtcggcttcgctttcggttttgacgtagacatgcttggtatttcaaattgttgccgggctcgtagtgttgtctgatcgtgagcctgagcttttcgtaaagtggaatttgttcccttgggcggtggtagcactggccggggttctaggtcaagatcgtcatcgtcattgtcatccgagcccgaggccgtctcttcatccagttcaatgcttataacttctgatactcttgacggtgcagtgaaacttccgatactgttcacccgggctcgtccagtagccaaagtcggtgcttgtccaaagcccgcagcagctctagtagaggactttggcgcgtgagctcccgctaaagaccgggtttttcgtgggctcgtcataaggtcgtggagatgtgttccagcccatctctcatcatcatcatcttcttcatctttctcctcgacttctccatcccctatatgtgcgagtccagctttttgtcgctccctcagcgcttcagcttctctttttcgctcaacctcatttggtagtgaggtacgcccgtctgtaggcctctcaatttctcttatcccggctgcgtgttcggctttcacctgctttcgccgtcgcaggtactcggcgtgatgtagatgttgagtaaatgtttgcgcgacggcgtagaactcgtcctcgaccatgacccagccgtcatcgtgttcaataccctcaatcaaaaatctataacgtgcttgttagcgacttcgtctggttgtgcgtggtctggttgcgatcatactcttcggatggacaacgtctgatgggagaggtcggcgggctttgggctgtacaaagtaatcagtctttatgtttcgtctcaaatattcgaagattagaagagacctacatgatctgaagaaatcacgcctggggggagaaactcgagggtttttgggagtgaggtcgcgatcagcaagttccgtcttcacgcgcttccgcggtgttgacttttttttcacaggggtggtattctcagcgcgaagccagggcaatgtcctgggcataattaagataatatagaccgaaattaacaggtcgcttggtgtcgtgattttaggggaagattacagtggagggaaagagagctgataggcatccgtagccgataaggtgaggtcacccgcattccgcgcaaaatagatcttcgattttggagcttcactacggactggagaatttgcaagtataagcctcgttatttggggtatctaatgtcatttggacattggtaatgcaagatgaaaagaactgggatggcctcaaacgccccgtgcaggatatatcaccgaaatcaagaacgaactgccggtagaacgccattcaagggaaacaaaaaaagaaaggaaacgccagcatctctgcaagcaaaagtccgattacacctcaccaggccgcttgctattgcagctcacgatcttcaccttgtccgcggatacagttgtctggttgtctagcttgaacgagacatccttgatcaagaaggtccagacttcgtcgcagaatcggtaggtgtcgaggtggccctaaaagaagtagaaaaatgtatacatcagcctcattgaactatgatcaagcaatgctcatctgggcaagggtgttctctgaaccggaatgagttaccttgaaggtcagtctggcccgaactttgtccgccaagacttcagtgacaatcttgtcaaaggtcccaaggatcttcatcgccagctggggctcgatacggccctcattgatcaggtcgtcgagggtatcggtgagggataacccgaggctgaatgttccttgggtcagttctgaaactttccgtttgtttcatagggtatattacctgctgccacggtaaagctcatagtaagctactgatgccattctgagataaaataatggcagactagtcgagagagtatcgggggagtgattgacaggagcaagttcatgatcgccggccgaatcgcggggggcggtcgccagcacgtgatctcaatatggtcacgtgtatattcttatctcaaattgcgtcagagtcagatgaattgaatgtgttggaacttatttttgacatcacaaaactctcagtaaacagacgacaaattcttaaaactactgcattatgattgtgaaggggttagggcctcgatctcctctcaatagaagattgttcagtcaattgcaagttcattgtgtacgatccttatcgacaagcttgttcagaccatcggaagctcaaggtcagtcagttccgttcaaatgcccaagtcagagctaactgcaatgctcctgaattttagaccctcaaggctaccaaattactaaatccaagcaagagaaaaccaatcagacaccagacgactcctcgaacaaagacaacaagtcacctaagcccaaaactgtctccgaagccgacgccgagcttcgtgagcggctggaacatatgtctggagaaggtggggcctctggaattgaatacgaagacggtaaaccgaatgcaatgaagcgcggcgtgcgaaacaacatgtttcgaataatctgaagcaatcttcgacatcaacatatctcaagacaacaaaccttgaccatctcaaatgttacaatatatatcaagtgaagtctcatgttctggaatctagacttggccccctgtgggaaagaaatgttctcaccgtttccttccggcctcgggggttaaagacgtctaccaggaccagacttgaatttgcttctgaaaacatagatgaggatttccagccttggctgcggttggctttgcctaattagtccgaatatgtgcatgtggatcttctttgatacagatacaaggtcatgcataatcaaatgcattccgctcttcaggtgttcgtgcattctccgatgacgattccttaggtggagccacgcaatcagtcacaatgttctcgctgtgaacttctcgactttcaatagttggaatattcctgcacatgtgccattggaaagctttgatttcgttaggagatgacttcattgcaatgtgcagggtcttgggccagagcaagtgcggtgaattgcatgcacgtcctgccagtgctcggggtagtgccccataggctgggcttcaacaccgctctgatcggcggtgaagtcttccttgtagaattggattttgacaagaaaaatgagagaccataaacatagcgagccaatataatggagccgaaaatggactagtccaagtacaattaaagaataaatcaatggaatcaggaccgtccaaaataggatcacaatggcagaaatcagatatcatttctatgcagtgagccccaacttgaattcaaagaaacagacattatcctaccaacacctaatttcgaaccattttcgcattgccgaattccacccaaaggaaaaaaaaacaaaaacagaccaatgcttgctaacatttcagagaaaagctcatttccgcacaaccatgccagccaaaacaccagcgccaatgacaccaccgtcggatgcttcccgtaaaaataccgacttcccacctcgttgcgggccagttcgcatgataagacggtcaatgtattgctggcacatctccttgaattgcgggtaatgttggataatgccaccagtgtaagccacgacgagctcttcaggaccggactgccaatctatcggcgtaggatcgaggacaggcacgacatgttcctgggctgcgtggctcgcagcaacagcggcagagttgaggcttgcagccgcagcgtccggtgcactaagggactcagtgatggtgtcgccgtggatctgaggtgaagcgggattctcgggtgagctgctgttgctatcttctttcagctcgatctcgcgagcacaggctagtagtccgaccactgcagcggcgatcagcccggctgatcgtctctgtacggtgcgagcgatctttcggaatgcgcctgcggctcgggcatcccagcgccagtcgctgcactctggtggggggagggatttgttcaaggctttggcgagatcgttgtcagatcgggctttagcaacaacgtcggagatatatgtggttgtcagggcgtattcttggatgaggtttgcaggtagggagcgtttcgataatttggctactgttgtgagatagtcgaaaatgatcaagcgaattagttcaccaatatagcggcctccagtcatgtattcaaagggctgaaagcctggccgcgaacaggcctggtctagctcaatgtcccatttcgtggtcacattgagctccttgagtggtggcgcagcacctgaaatagtccactcggtgttgacaacagtctccacagcgctaggctccattatgttcacgctcttggctttcgattcgtgcaatgcactaagcttcattgggatggttgcgttacagccagtacccacaatgatacccatggcgactctgctgtttggtagagatttgaccttgtatgcaagggaagctagtgtggccaccgtgtcattggtgatagcttggattttcagttttggtaatgcaaaaagctttcgacgtttggttgaaggttcatcttcatcatcgggtcgccttgtgtgtttttcatatccatctagaagtatattgccaagattgaggtttgacgagatagcgaagcctttccccatgggcattaatgtggcttctgctaatgattcttgcctgggcttagttagtacaaaatccactacaacgcgaagggaaccacacagcccgacacccataatacaagcacaggcggaaaaactcacatgatggggaaactgaatgtgattcccatgtccaattcggcggggatgtcctttttagtagcatctgatgatagactctccgctaccacctccgcaatgcaatccccgatccaagaaaagagatcctcagccttatccatcttcaaatgttcttgaataggccaagctcgttccagcgttcgtttcacccgctggcgctgagctttccggatagtgtcgcgtgacctctccgtggcatctgtaggccgaacatcggaatcgacggcttctccgagtaattcgataaaagcgactcgaaggttgctacctcctacatcgatcgccagatagcgaccggtttcccggccagtaggaagttgagtcacgggtgttggcaaaaattgctggtccgatgtcagggcaaggttgcggtatgtggtggaaaagcgccgggccagtttatacagcacagcctcatccaggaacagcggtgacaaaaattcttccaattgttgatggtgcgccagacattcttgttcaacggcgtttagttccgaactagcctcctcatcatcttcaatcagatcgtcgtgcatgatttcgtgctcctcatcctcatccttcttggacgattttgagttaaccgaggccatgatgaaggatagtagatataccccaactttttttttagaaaaaaaccccttatgtcaggttgaaaattccagacaaaatgagccgagacagctatgtcaatagtgacgtgtagggtctggaatgtttaggaatagagacagggcagcatatccttaaaatccttaaaatccttgaattgtggagacaagctaccggcgctaatccaatgccccaagagctagtcttgttgtgttagcgaggttgcaacaaagggaagataacatttcggtgacgcggtctgcaggtcgtccgggctgcgggggaaaaagagaaaacacgacgatcatgccagaattggaaaccccatatatggtttattccgtacataccctggaatttggtatgcacagattgcgcagataatgaaaacaatatttctgggggattcggggagatgggatgacacagactatatacgggggggaatcttttgggccaagaaaatacccctagatggccctgagggattgggtgaagaatggaagtgtaaagctccctgcttaagacgggacagagggaaaacaaaagaggaaacagaaagagacaaaataatatatgggatttgttcaacggtacctttatgttttggtcagactaagtattggagtcatcggaagaatagtcggagaatagtcggaagaagtgggggggaaatgatccctatcagatgctatgtatatatgatcagatagaagaaagattagacagtttattagaggttataaggaagaatatataagagatgggatgcgaccatcggaagacactaggcaatgcgacgctgttcgggacaagttgaggatcgccttgactttctattggattgggaaaactctacttggctttaatatcccctctttggcgtctttataaaatcaacgttgcgaattctatgtaaccctacattaagccattatatccggctaaacccccttccctagctttaagtagagattatcccggagagccaagccaacttctctatcttggcagtctcaggattagacaaaacacacgagcctgcgtattaaagcagaagttccaatctgttaccgactaatatgcctctatgagggatattggtggggttgaaggattccggcttggaaaaacgcgccaaagtatcgccaatgttgctattcgttcaatacgagggacgcctaagtgggatatcctacttgtggcactcgcgtgatcggtccggacatgcccatattcagacgcaggcacatctcacgaccttttgatctgacgggaattaagccgttcgcacggtctcgatcgttcgctggcatccgccacatcaggctgtcagatcttactagaggcggttcaaactacggggtaccttaccttggggttgcctgcccataattggtcatctacctgtcggcaaatagtccgattgttctcgtgtttggcataattctatcgatagaattgtttacttcgtaatgaaggtttcatgtacgagcctcaaagcacgcgatctcaagccattatgtacagtctgtccgtagaccatacccgacaaagcctagtaattctagacctggggctattcgaaacccaagctatagagtagtcgatgccccatctaagttgtctccgaagtcggagcccagcctaatctgatgaatgtgtacggagtacacggatatgggtagaccgtactccgtatagcctcggtgattaacggagcaaactacaacatacacttaaaagtggacaggatcctaccaatagtaataaatatgtaataatcacagggctgcatccttattagttaacgataatcggtcgggctcctccgtagcttagggtagttggggaataccttatgtaatggccttggcagcccaaggttcacctgggactctccacatgatcttatcaaaacaacgtcactcctgattttaccccatcatggagaaactaccgatccactctaaggagggatatggtgaccctcttgaattagcaaacaaccctgatcgtcgtgtgcgttctagcacaacaacctatttgtatcggattggtgtcgtcgcgttgctcttcgtcggctaccttgtgcttctacggccgtctcacccatgtaccggcatagctccacaaacggagagctatcaagctgaggttcaacaagagtatgacgactacttaaagctgggacattctgctcctgatgcacatcaaacacttgaagaaaataagatcccgctggaggctcacatcatgagcaaatgcccggatgctcaggcctgcttgcaaaaactggttctaccggctatggaaaaaataagtgacaaagtggacttcaagctatcatttattgctaggtgagcatcaaagtaaatgtgcagaataaccgatgttattgcaccagagtccatccgaaacatttgactgatactataataatagtgtgtctaaagattccgaagagatagcgtgcaagcatggcccaggtgaatgcatcggtgacatgctcatgctctgtgcggccaacctacctttccctcctaccgcagacgaagcatctcttccatctcagtatccccggacccctatcatccggtcactaggattcgcaaattgtctgatcaatgactttgcccggatcccagaccgcgagtttgttcaccaatgtgcaatggagcatgggattgactttgacgccttgaacaagtgtgcgagccaggagaatgatgatccgaacgatggcaacgacggcggaccaccacttagtggaattgcgctgctgcgtgaaagcgctcttcagggcgaacaactcggcgttaagatcagttgcacagtgcgtctagatgatgctgtttggtgcatccgcgataatgatgaatggaaaaactgtgtccataatggagcaggtagccagccctcagccctgatcgatcaagtcgaaaagctgtggaaggagagaaactgagttctacatggatgctttatcgttcataccccgcattcatacccatacgataggacatgacactcgataaatgccattgatgatcccctactatcatattgcaccaccgtaggcattccctacatttcgagtaggcgcttaagccatgccttcccatatgaactgccctatttggtgaccctaactccatgtgtgtcatgagttgaagatggtgttttcctcgcttaatttaaacaaacaatgcccattagccgagtcacgcacagttttcctcgccattgttgcatttaatcaggtcagagaccttttcccttcaccttcctctttctctccccaccacaagccaccatcagcacagtgcggcaatcgtcctcgaaccgcgtggagcttcgcaatgtcaccagtttctcatccaaaacagcgtggtaagttgtttcagccttgatcgactctattaccatcatctcgtcatgctaacaatttgggatgatagaggccaaatctgtcatgtcgcgcggggtgtgtgataaggaagagaccttgtaccttaagtggagtctggtgctgagcccaagcgagcttctaaaagagcttgttggcgacagcgagcatgctcgagccctctttcatggaatgaggcgccaggtccggtccatccgccgccgctcgcagtcctatgatgatggacaggtcacaatctacgaccgtgttctccttcgtctctatgacgagggacacactatgaaacactacggcctgcttggattttacctgaccgagcatctggggactaagaactgcaaatcggaggaggagaaaaacactctagttgctgcccacttagctgcccagcgcatcctggacaatggtttgtcgctgcgtgttgagcaatttacttttcatgcattctaacataacctaccaggccctatttccgaaatccctgtcattgcagccgataacgtggaaggaatcaccaaggacgccaggaccagcaagtcgccacagagctctggcacatccaactcacaccatatcgacaagctcatccaggtgtaccagaaggccaaggctgactactacatccttgaagtcaccgagagccaccgcgagcgaaccaacagcgttcgattcctccgtgacacggccgaaaacctcctgcgatacctgaagtcagtcaaccaaggccacgatctgatccccgagatcgagggtatcattcgggtcagccaagctcatgcaaacgaacttgccggcggccgcaagcgcaagtttgagcacgtagacaacgactccaggggcagcccaagcctcagcccctaccgaccctacggattccacagagaccagcgcagaggacacaaacgtcgtgaccgatatgtccctgacagtgtcacatgggaatacagccatgttgaccggcgagctggacgagatagccgtgcccttgactcctaccgtccttcttaagctcactgttctgagctgaccgaacgatacgttctgaattatggggtaaccattttcttcgctaccgcttagggaaagtacaaacctgcatgtactagaaaaatcagtcccaaattgaatcaacaacccaatttcacaagcaagcgtcctcctccttgtagaatagttgacctcgggacagtcgaagtatgaaatcctaagctatgcgctaagccattctcatcttagcgttgtttacaagcccacgtgcacagatgacataatccctcccagaaggggcctggggatcccgatgatcaacactggtcacccggtctcgcgaattgaggggaaacctgttgtattccttcatttcggttcagggaaggggtaatctctgacccaatggagactacctcactgatcaggctcttagaacgaccccaaaaagtctctcccctgagaaatggcagaccttcatccctccgccgcggggaataatgcatcttccactagctccagcacatcctcaaacccacgattcactccagtttcttatacctcagacgaagaaaacccagtgccagggactgcagaatcacccgtaggctcattgcgactgcagaccaacttcgatgaccaccaagacgttggcgaccctctatccgatttcgagaacgacggcaactataacacaagtgaggaacgagagggcaagattccacgcggcggcttgggtccgagatatacaccggaggaggagagcgaggtagtgaggagatttgaccgaaggctcgtcccgtttctggcacttctctacttgctctccttcttggaccgctccagtatgtttggttattccgcacagcgcagtgctctccctattgttacaagcatgtactgatcgggtatgcagacattggaaatgcaaagatagcaggactccaagacgatctacaactttcatcttcgcaatatgaatggctacttactgctttttacattacctacattctcttcgaatggatgacgctgatgtaccgtgttgttcccccgcatatttatatatccctatgtgtatgtggatggggactagtcgcatcatttcagtgtctagctacttcctttgggggcctggtcgttctccgggcattgcttggaatcaccgaggcggcttttggccccggtgttccgttttacctgtctttgttctatcgcagacatgagctggctttccgcaatggattgtttatctcagcggcaccgctcgcaacatcttttgcgagtagtttggcctacttgattgtcaggttcagcagtgacggcccgatctcaccgtggcgaactctcttcctcgtggaggggttcccgagtgtaattgttgcggtatttgcttggtttctgattccggactctcctggtcgggctcgattcctgagtcgccgacaaagggtggtagctcagcagcgtctcgaagagagcaaaaccgactataagcaatcgtatgggagtcaatttaactggcgagaaatcctgaaaactgcagcggaccccaaggcttatattgctgccgtgagtctttatctatatttgagattgtacaaagggttttaacacatttactacagtttatgtttttcagttgcaacgttgctttcagctcaatgcctgtctttttgcctactatcatcaaagagtatgcccgtcgccagcatctattcacaatctcaacagccagcttacatctcttatagtatgggatactcctccttacaagcccaagccctctcagcacctccctatctcgttgcctttgttgtagtcctcctcactgcatacgcctcagatcgcagccgctcccgaagcccatacctaatagcgcacgctcttatctcctcactcgcttacttagcgatcgcagcaactggttatttccactccgggctgtcaccatggcttcacacattcatccgctacatctgcgtctaccccccccccgcgggggggtttttccccatcaccctcctcattttaatgnnnnnnnnnnnnnnnnnnnnnnnnnnnnnnnnnnnnnnnccccccacctccggcttctccccccccgcggcggggttcttttccgcaatcaccatcatcattacatgggcaatggataaccgtgtcgaaaaggaaggcaagggcgcaagcattgccattctcaatatcatcggacaatgtggacccctgctcgggacgagactgtatcccgagactgacgggccgtggtatattcggggcatggctacatgttcgtttttcatgtttgttgttgctatattggcggtggtactgcgggttcttctacagaggatgaatcgggcggttgcggaaacgacctataatattgcacaggctggccctgttgatcagggtgaggagcgggatgtgctcatgggaggtgggaggagggatgatttggagaattccactggggatagaaggcttgtatatatcatatagtcgatacaataatgaccacttgaggtttctctgctttggtgaggtgatctctgtagaatgttcttattagactgccggtctagaatccctttggggatgaaaggaattggaagagcacgatgtgaatcacaaagagataaaagtaaggaatatgattaaggcgacgagtgcatagtcgctatatgtggtgcgtatgtaaagtctatatgatatgtacatgtgtacactcaagggtgtgtatttcaggtttcttggaatcaaagaagcgcagcgaagggcgaatcggcaacctgcgactccttccagccaatacacttccagcagctcaacaaacctctggggtcgtatttcttcttaattctcaacaatttcgcgtagttatcaccccaccacgcctcgatccaatcaattgtgaacgggttggcctcgttgctgtacgcaccactgccaggagtaataccctcaataatggccgtcatgttttgaattgattggatcttctgtttccgggtgggaagggtagcgttccagtcccaggtggcaccggatcccagctcccaaatagcctcccgccaggcgggagaagcgctggtcgatccttcggtgtagttgtacaacactggtccgacgacggggatataaggtgtctggcccagtgattggatgactgcgaagtaatccatgaggttctgacggccctcaacggtgttgaagatggagcgggggatcagtcggcttccggggaagcgagtgacgccgacagcgacggagctggtcttgacgtatttctcgtaaaaggggtaccaagaagtgaactcctcgatggtggcagagccgccatttgctttggcataggcgatcacgcttgccagagagacctcggcctcctcgacggagaggaaaggagagatgttgacgagggtgttaccggtgatgtggccgccccatccctcctgtccccatttgagggtgttgttgacaacgatctccatgaatggaagcatgttagtggagttgctggtgaacttgatgttggcagcgacaaagcggatagcaggttcgacatggtgagtgctttcgaggaccacgccgaaggttccaccgccgccaccgcgaagggcccagaagaggtcgcggttctggaattcgttggcggtgcggtagacaccgtctggagtgacgatcttgaactcgaggacacggtcaacgccgagaccgtacacggggctcaagatggaatggccgccgttttggatccagccgcccgagacaccgacggtgggtgagtagccgccgagtatggttacgttttttgtctgtgcaaattcgtaaacctcgtcgaaattgactccagcgccgacggtgatggcttgatatctgcgagaggtgttcttagagccgcgtggagcgaagtccgcactgtactgcatagatttcaggtttcgcgtccaaagggatagcgtgtcacgcccactgctgcgagtgaggtaatcatggccactatttttgatgacgagcttcttgccggagcagttggagaacttgaaggcttcaatcacatccttggcactctgcacctcaagatagtgagagggtagattaccctgacgacaggtggtattcacaaatgctagggggtccgtcggatcgctgctgtcgaggaggcactgatcactagggtcggatgcccacatctcatcctggttgttcatgtagccattaggagaatttgttcgcatcaatggatccgagtagttggcctggatagtagcacaggcggcattgtcgcgagccactggtttcccattgtagttggagaagcagggcaaggagaaaggagtgagaagctggaggcgccctgcaacagttgcattgaagtcattcaaagtgcagtgctttgcaacagtcgagcttactaaggccaataggaccaggccggaggacttggccaacatcattgacgattgcagaagaaaggatgaaaatcacgacacagaaaaagtataactcagacagaagaaccagctgaggagaaaaggtgtcttacttgtaactaagaatttaacctatttcggcaaaagatcaccgcaatatctgcacgatctatataattggctggcccttatattaatcaatcttaagatactatcctgcagactccaaagcttgaagaccggcaaggaatattgtatttccaccggaaatcccactaattattccacttattattcccttcagaaagtgaatcgtccaatggtgacatctagctctccacacaagtcgaactagttccaatcagatgccggtgaaacctcgtataaatcggccctctacaacatagggaatgaagcgtatcatctatattaaattgcctgattattcgaaacccaagagattattttcgtatctagatatgtatacatactgactacatgtagcagagagagtcaattaattccttgttggttaccgctgtaaaatgaaaacacgtaatttatttaaggtggggtccaccatccctgatcgggactagcctacagtcaactgccggtcggtgggtcctgcatgtatgaaaatggaaatgtccggaaaatgtcgatcctcccccctgttcgtctaagctccccaatcactcggttctcggttctcggttctcacgaagttttgattttttctatcttcccaccatgtcaatatggagcaccaggtgaatgtctattggaaaaacgtcctcacgattgtgccaattgttggggcgggcgtggctactattacctacctgttacgtctatactgcaggcgggtgaaaagggtggggctgttgctggaggattatctaatgggcgctggtctgatcctctcctactgtgtcacagcttttgtagtagatagtgagtattcctccccatgaatctatcatactaactatactaactattaaagccgccttcaatggcgtcgggctacccatcacatcgcttcccaaatatgaacggatgcgtattcaattcgtatgttatagcttataccgtggtaatggaaagatctaacagcattccgcagggatcatggatgatacagaagttctgggccccgtcaatggcttttgtcaagatctcgattgtcatctttattaaacgactattcggctcgatacgtgcatacgtcattatcaccaattgtctcgttgcatttatcgccacatgggctctcgctgccctgttgaccaataccttccaatgcacaccggtgcaatactactacgataaggatttggacggacattgcatgcccgggcaggttcaattcttccaggccatgggatcgatcgcattggttgaagatgttatcattctctgtctgccaattcccgtattttggaggttacagatcaaccgtcggcagaaaatagcattaatcctggtgttttctctgggtggactgtgcgtgactccctccttccaaatgataattcctttccttctaatgatatattgcagtgtctgtatcttcagtctgatgcgcctgattgaattccgcgaattccagctcaccgaccttgcgggtgcgttcctatccccagctcgtacgatgattccaactaacatcatccagcctcaagcgccaaagaatccatctggacttgcctggaactcgacgtcgcgatcatttgtggctgtctgccgtttcttaacccacttgtgcaaggcgtccgcaacaaagtcagaagtgacgcctcaaaatatcaatcccaaccttctgccggatccaacctgcatttacactcgatgcggggaaacaaaggcgattttcgagagcttgatagtgattgtggagcatcagcgaactcaatcagtcgtaatgctacgacaagtcggcagagctcggatatggagaataataggcaggatgtggatggacggtccaacaatatcaggccttcatgatttttattcttaataatacgtatttcaattccccaatacatagtttcaatacttctagatatctcttacttcagaactctctcactttagatatttctcaatttagtatctcgttgtagtatcccatccttcacaactcattcttaagcccacatggccttgaacttgttatcaaactcggcgtgcagttctttgaaggccttggcaaccaagaacatggatcggtaagaattatccactggctcttgcgtatttttagagctgagcccgttgctcgcatctttggaagcattgatggcttcatcctcaatttcatcatcttcatcatccatctcatcctcccagctatcaatcacaaccttcttcgcccggggccgagaggtggggacgggggcagcagacgcctgcttgttgtctagtttgacgtccatctttccagcattttcagcctcaatctgatcaacggccttatcatccacgagattttcgtaatcgtcgcctccgccagcaacatcgagcatgtctgcaccgatattgcttccaggcttgaggaagccctcaatgctagtcttaatggtagccagagtcaatgagaagtcgttcagcacaaaccagatgtctccgcgacggatgcggtttgcagtctccaactgagaaacatttccgtgcttgaagaagtcatacaggtatgcattgagagggatggcgttctcgttgggatcaacagccacatatggaatgacggaatcctcaatccaaacgccactgcgaaccatctgactgagttcgaagacagtactgcattggtctccgtttcctgaaagggcgaagaatggtgatatgattgatggggagatgtggtcaaactgcgagaacccgagttgctcgcaggaactttctccaccgcacttgatcccactgaatggtagcgaacagtctggttccttgatatgctgctcgacaaaagtggagaaatagccagtgtagacatctaggacctgtctgttgtgagcacgtagggcggaggctgcttttctcggtaaaggtggaagagccacgatcgaggaaggcttcttttccgcgttttggaaccgttccaaggtggactctcgcaggggaatacgcccgaaaaggtgggccatgaccagcatcagagtttcaagagtcttttttggctttgtctctatgtcctgacagagatcttggaggtatcccgaattcagtagggcatggaaagcaaaactagaattctctgtgtagtacagatgagagatacagcccgcaaaattcacagccatacctgtactgctaagaagattgtttcgtcggaggtattcgatagagaatcggagatggtggagcaccgtctgcttcatctcagggccaccgaggtgaatgcgagaacttgagaggatcgaattgattgatttcacggcagacggagcttgctttgatccatatagcaagatgaacaaccgtagaaccaagcttgtcgtaatggggaaatgtccactgagacttgggagtctcgaactcatcagtcgttgcaccttggatggtgggacctgctggaaaacaacatttcccaggacatcgaatccacggcgacctgctcttccggcggcttggcggaaattcagggctgtcaagaaaatggaatcgcctgaaaaaacgactgtcttacaaggcatgttgatacccaaagccaaagttccagttgcaataacgacacgtaaaaagcctttcctaaagaggatctcacaaacttgacggtacttgcgattcataccagcatggtggacaccaattcctcgctctagggcatctatcaaccattgaggcaccgagcgccactgcaactgcttggaataaacaaggaactcggaagcgggtactttcttgaagtcagccaaatggaatccatccacaggcctcttcggatcaaagagatcaagccagccgaaatcggtagatgctgattctttggcttgctctgccttggaaattggctcttcgtcagcgtttccacttgttttcttcttggtagccctttcaagcttcttctttgctgacagcttggatgtcttccatacttcccatttggcaatcttggatttccataccggactctcttctttccattttgtctcggcattttgtagctgtgtcaacagcgattggcatatatcttcacatctaccgcggtcataattgaagaatagcgcggggagggcattctgagcgtgtaacgaggcgatcaaagggagggttgtgtcgaccaggttcccgtgtagggtgccagataggccattcatccgagacacctgtttcgataagtccttttctttctcgactacaaaccctgttgggtgttcgagatggagtaaaagtgtctcaaatggagattcccggtctttcatccactcccctaacaactttttcagttgtccctgccactctatgacatgtactttttggatgacagtattcgagaaaaagatggatggatccagagatggatcaacagggaactgctttgtttgaaggtccttcattgctttccagagggtgaagcagtcacgtggctcaaagtcaagatcatctggtatcgatctggtgcggtccaaaaggctagtgacaggatgaacgaacgtcatatcatctgctccatcgaggcccaaacgggccaagctaggagtgctggaaaaccctttgaacgagaagtcaccatggggctggtacacgtacttccgcaagtccgaataacggtggtgatgctggatcattttgaggtcaaatccattgcttctctgggcaaaatcaagccagttgtagaattcctggggatttccgacggtagccgagagtgctataattgggcatggggacatcagaagcagttgttcccaaacgacaccatcatcggcctggccaatgcaatgaatctcatcaaaaatgatacgcctcaagcggggagtccatgcattggcgttcgagggattaagcagcatgatctgaagaatctggggcaccgtgatgagaatttggcatccctgaggattattgatgcggtagtctcttgtgtggatggcccaaaccgatttcccgctggttttggctgggaaggttttggaaaatcgggcttgcacctcagctgcgatctgattgacaagagcttttgtgggggcaacataaacaagaattccatcgttatcttctttcaaaatctgtctcatcgcatagaagctgacgaatattagcataactctcaatcaggaaaaattgcgacttacgaaataaatgtttttcctgcactcgttggggccacgatgaatgcgctcttctttgcatcgatctggtccagaacttcacgctgccagcggtcgggcgcaaaatcaggcgtccgggagtcgggcaatgagtctatgctgcgctccatgaaaggcccaccatgtagaagctggaattcaactgggctcatctcaatactcatgctgggtgctgctttaggaattttgaacgccgggaaagatagtttctgttcactatcggcatgaagctgggcagctggcaaaccaagtacttcacagacagtcgagacatatgcgacaatatcggatgagataccctgcttgattttcacaagagaagtgacgatctcccaaatgcgtgtcacgatcaacatatgctttttattctgcggatttatgcgttcgaaaaagagaaggcgtagcaatgtatcaatcatgcaagtcagaatttcgggctccagaacctgtcgactgtctttaggtagactagttaagtatccgttgagcttcgtaaaacgagtcacaagatcatcgatgagagaaaattcgtcattgtacacgtttttccacttctgtctctgtttttgagtgacttccattgctttttgatgaacgaaagctgcggccatctctttggtggatggtttaccagatttggagtgagatttcttgtctgatttcgaggtcgtcgggtgggttccaacgtctctgcttgccgaaggagtttggtgagacttctgacgtgaactactggaagattcgacaacaatcggctctggttgtgatccagagagacttgcagcataatctctcatctcggccataaaacgctggtttcgtttgtggtttcgctcaacctcttggggggttaggatgactttcttttgatcaaggggcctggagctatgccagtggctatcttctttgaactccttgaaaacttgcgaatcactcttcgcatcggcagattcatcgactacgagctggacaggctccagaattttatcgaagactgcattgctaaatggaagcaccttttcaaagccatgataaggcttagagataattccgtgagtggtatgttccaagggagcgggagctcccccaatcgcttcacattgcagtgttgttccacaaatgcggtccaccagagacgcaagagtgttgaacggggattgtgtggccgatgaaattactgtttggatgccgagtttctcgaccatccactggactccgaagaacaatgttccgtccacgaggtcagacaggtcgcaaggtaggctatggtcgctcatttctttctcccaaagcttcgagctgagcaaagcattcgcggttttcacgaattcattgaaaaacttcaagtttttgggtacagttgttgtttggattgatcgatccgacagttgcgtgttttgtaaaagtacaatgtgcaaaagcatagactgtgctccaatcttattttcgaggctatccgtcacgctacccaaaagcatggagctaagcgtagcaaccaccagacattggcgctgcgacagctcgggcttctcaagaagtgcctgttgaagaaagttatctgtttgagcctggtttgacgattcgtttttgatggaatcgtagtccagcgcatcctccgcttggtcttggctgtcctcaatatccaattgggagagggaattccacaattgatcgggatcgtctgtttcagggccagtcgataagggattcgtttttatggagctttcaatcaccattgccatgacctgcgtatattgtgagtacagagcttggtcttctgcagctgaaaagacctaccttggtgtcacggaactcaagactattgatgagagcaatgttgtatccgtggacaacgaaccagtagatcatcgcgcggagcttgaaccttgagatctcgcctcgcttatcgacaaaagaacctttctggtcaccatcttcgagatcgctgctgtcagaatcactttcagaatcgctgctgtcgatatcactagcaatatcatccttgttttgctcggaagaagcaccatcgtgacacatgaacaaataggcccccgaacttatcagatgagctttaaactcatcggactggaagttatcaaacctcagaacctggaagtatcgcgatggttggacgcgaatagacacaagatgctgtatgatcgcctctcgggcaaggaggtacctcgcgtggaggtctctgtgaactcccttgggaatgcataatgaggcattctcggcgaaaaagacaatctcgaagaaacacttgcgctgttgaagcttttgtaacaacttctcggcaaggtaagtcgcatgcaagacctggaaaccagggttgaaatcaagtttgtcgttggaaaagcattcgagcagaagcgaatctccttcgattatgaaaagctcgtcaccaacaaagtcaccgacgaggtcaacgacccgagagtctaggttattgtacctttgtttaatcattagtaaaatcgagcgaagtccgaaagctgcaaagccagtgctcaccaatctagcacaacatggcgatccattatcttctcaatatttgcgggggtcgcctagatggctggatataaattagtagtgtcaagaccggaggatcggcattttgagcgacgaacaggatgaaccaggtaagctaagctagagcaagggaaacaatgtgtggcacaaagaaggagaagatggtaaaatagaaatttgggatggccttcagggaaaatatgaaatgcaaacgttcagaaggaggggcattaaacaggatatattgggaatgtgttgggcatgtgctcagtcgactcaagatccaacaaaccgcttacctatgatattcagtgtgatggggctctgactcattgcctctaatactctttttggcggcgtaaagacagtatctagaatagttgggctcttgatttctttgggtttacaattgtgaagggattttgggcagaaaagccaatgaccgccttctccagtatacgatgtacggcagtatacaacatccaggatagatcaagagcagacatccgatatttgatatttgtgaaatgtcgaaagccatagcatgggccaagatattgtatattcttgtagcattttcgggggcttggcaatggactccgattttgttccgactgggtaactcaaaagcccacggaatgcttcaacggctagttggaagcgtaatgcattttattttcctacttgatatgatttgataaatatttcgagacatccaaaggctccaagttccacaaaaaattatgggcagttataagtcacaagtcaagggatatgtgtgatatttctgttaataaagaaataagcaacgcattccttctctcctgcggctggttttcatggagatccccgacagacacatgacctcatctcgcggcaatggattaactgaattcgatttggctttgcgaagaccaccacgaacaaatagtgcaaagaaatgagaggggaaaaacgatacacgcaatgtccagactcccatcaaccgtcccaatcacccaattcccttgggaataaacgccaattcctcgctaggaaggtactcgtaaacgaagcacacaaaaaaaaaaagacctgttaggaatgggccgcttgggaacattatagcataccggcgaaacccacattcgtctcgtgtccgaagccgctgcgaaggctgccgaaatctagtttcatgagcagacgatctacccccgctgctttatggggcacgtaatgactgaacccggggctcgtgctgtcatcaacgtgccgggaaccaggccacatatgaccgaagttcgttgctagttccacgggtcctttgccttctcccgagcgactatcgtcaatgtcccgcagggtcccaacgagattcttaatacccgtctcgacatcgtttcgagtggtacgtaactcttcccatacatcgcgttcttcctgggcataatccaccaacgcgtcttccacgccttcatctgtttctagatccatgttgcgttggatggtttccaaccggatcacaagggcgacgaagcggtcgatatttgtgagtagtcctctcatggtgtttgtgaagggtagttcagtcaaaaagagggactggaccagcgatgacaagtgccgccggtgtgcaaccgtgagagcctcgggatcgtgccgtcccatggtctgttggccagactcggggaagtctctggtcggaatctggttaggagacactgtcttggaactatgctgcgatttagaagaggatgcggttccaggtcgggacccaggggctgatgctgtagatgaagagcttccttcaatccattggcgaaggtgctgccacgactcattgacaacatctccttggaaaaagccaccgatctcggaaagcataaatagacatgcacttcctgtggcccagatatgacgcatttggcgaacacgggcattatctctatctcttcttgcctttagctttgcttggccaaagatactgttgcttctgggcggtccccatggcgtagggtagtttcgccgcaacggagttcgtttccaaagatccccaagccggatttgagcccgccgtattcccaggagataagaatgaatcttagaatatatgacaatatcagagctcgagatgaacaggtctagaggagctcggatatgtgaagtgagggttgtcggcgtggggaagagcaggtcttcaaatgagacctttgagattttggataataagttgggagtttgggcaggcgtcatcggtcggccacttttgcggccactaatggacagagaaagaaggtcccgggcaagttcaagttcttcgtcggccgggtcctcctccttttccagcgagaaaagctctgcccatgcttcagctagagcagctgtgacatcaccttctttgacggtaaggacgtcaggttttcccaaaggacgagtcgctgatgggcctcggcgtcggctttcctcaatgcgggaatctgcatgtgctacaagagctaccgcaaactcccctcgtcctagtaaaaggaaattgtgaagcaaagtaagaatttctagaatttttgggaggggcaacaatttcgacaaggttgattgagaaagggaaaggcgaatggagtcaacggcggtagtcagttttgaaggcgaaattggtgatttcaggcctgcaagttgctcgatgtgctcccgatataacgtaaccggcgcagtagaggttcctgctattgaggttttccgtttcgcccggatatgattgagagatttaccaatgaatagtattgagcctgctgtttgtgctgtgacaaaatttgggagcaatcggacgtttatgctgaattgtgcctcgtcattctccttttcggtatcctcttggataaaaaagtcctccttcccgtagatgggaagattcccataaagtaaccacatcgaaagctgtttcatccatgctgtctcagccgttgtcgctaattgcagggccatgtctttgatatcgagatatcctgtttgagcttcggtccgcaggtgatctatgagcgctgcccccgtggagccatgcaaaggttcggtgtttttcctttctggttgaatgaaccggataatagtccagagccattccatgcgccgcgtccatggtgcgaactctcccacgatagtcgacaatgggacaataccataccctccgacatatccgctgtcctcggcaaggattgccctctcaacctccagtatcttcttctggaattcacctagatgcgttccaataacagctgtggagactgagcggcatataactgatggactcgcagaggatatatcggaggcatatttccgcagctgcgcgtggagtcggcttagatggacaacggaggcgaggagagctttctccggaggtgaaagaaggggaaagtcatcttgagcgacagaattctccttcctttgtgtacggaagaggagggatggctggccggagagggagagtaggatctcatggagcattctgacgagagttccctatcggatccatatcaatcacgagctcatcacaggcgtatatgcagataactcacctagggaaattccttctctccgttggaccgttcttacgctgccagtataatagaccgcgccccacgaattcaaagcgacacatatgataaagcgtttgacgacgccaagcttcgcgttgacgccgaggcgcgtcaaacgtgacgtgtgaaatagtaggcttcagaaccaatcggagaagatagaggtggttttcattctccagagtcgaccccaatattatctagatatcacagcttccaactctcaacaagacactctgtgactcgagaacagtagctcccatggaagaatcgcggggcctaaaggccaatcgtcgtctcaccgcccgttagtcatctcttagctgtcggcccctcttacgtcggtccctctctcgatctctctcatactctttactgacttgtcctttacttattcgcacctcctaccttacacagtgttccattttctcttttctttcataaacctctatcgtccgtcgattgcgctcggattttgctactcttctacgtgctcgttgagctaggtacctggtacgctaggcgttgcaacttgatttatcatcactattgaaagacttgctctatcgcaaggctttcacctcctgactttcatcattccttcaaacattcctgttcgagacgcggctaagcccggaaagcgcagagcctctgaacacgacgtcgtcggagctcggccagagaaaagaaccatgacggtatgattagtcttgatcttagagataagattgccactaatatatcttaccaaaggacattaaaatgcaggtcgagaacccccaagaaaccatcgaagctatcaagcatggggagatcgacgaatcattgtacagtcgacagctgtaagccccccgcatccctcttatgacatacagatcccgagtatgtgctgacaccttagagatacgttcttggtcacgaagccatgaagcgcatgggatcttccaatgttctgattgtaggtctcaagggcttgggcgtggaaatcggtatgtgattcaactattaatcaagcctcgatttcatcccgacgtctgattgtctccatagccaagaacatcgccctcgccggtgtcaaatccctcaccctatacgaccccgcagcagtcgctatctcggatctttcttcgcagtttttccttcagccagaggacgtcggcaagccccgtgctgaagttaccgccccgagagtcgccgagttgaactcctacgttcccgttacagtccatgagggccagagcctcgtgggcgatctcgaacgactaaagcactaccaggcagtggtgctcacacagacacctttgaaggagcaactggtgattgctgacttctgccacaagaacaacatctaccttacaattacagacacattcggtctctttggttatatcttcaatgactttggaaagaacttcactgtgggtgatcccaccggtgaagagcctgctggtggaattgtggcggctatcaatgaagaagggttggtttcggcgctcgatgagacaaggcatggactcgaggatggtgactttgtcactttcactgaagtcaagggcatggatggcttaaacaacagtgatcctcgcaaagttactgtgaaaggtccctatactttcaccattggtgacgtgtctggtctaggatcctacgagggtggtggtctattcgctcaggtcaagatgcccaagttcattgatttccagccactagaggatcaacttaaaaagcccgagcttctcatgtccgactatgccaagtttgaccggccacaacaattgcacattggtatccaggctcttcataagttcgcggagactcatgatggccaattacctcatccccacaatgatagcgacgcccaggaggttctgaagatcgctaacgatcttgctgctactgatgaggaaaaagtcgaactggatgagaagataataaaggagctgagctaccaggcccgcggtgacctgaacccattggcagctttcttcggtggtatcgccgcccaggaagttctgaaggctgtctccggcaagttcagtcctattcatcagtggttgtactttgactctttggagtctttgccctcatcagtcactcgatctgaagaaagctgcaagcctcttggtacccgctacgatgggcaaattgcggtgtttggcaaggaataccaagacaaacttgccaatgtcaccgaatttttggtcggttctggtgctatcggttgtgagacgctgaagaattgggctatgatgggtctgggtacgggtccgaaaggaaagctttacgtcaccgacatggaccagattgagaagagcaatcttaaccggcaattcctcttccgtaccaaggacgtcggcagactcaagagtgaatgcgcgtctgcggccgctcaagcaatgaaccgagaattgaaagacaagattgtcactcttcgtgatcgcgtcggtgccgacactgaacatgtattcaatgaggatttctggaacggccttgatggtgtgacaaacgctttagacaacgtcgatgcacggacatatgttgatcgccgctgtgtcttcttccgcaagccattgctggagagtggtaccctgggcaccaagtgtaacactcaggtcgttcttcctttcatcacggagtcctactctagctctcaggatcccccggagaagtcattccctatgtgtactctgaagagcttcccgaaccgcattgagcacaccattgcatgggcacgggatgtcttccaaacctacttcgttggtccccctgaatcagtcaacatgtacctctctcaacccgactacattcagcagaccctcaagcaagcgggtaatgagaagcaaaccttggagcacttgcgtgacttcttggtcactgaaaaacctctaactttcgatgattgtattgtgtgggctcgccaacaatttgaagcgcagtacaataacgcgatccagcagcttctctacaacttcccccgagattccaagacatcatccggtcaactattctggtctggacctaagcgcgcccctacacccttgaagttcgacagcactaatccaactcatcttggatttgttattgccggtgctaacctccatgcgttcaactacggcatcaagaaccccggtgcggacaaggactattaccgcagggtagttgatgacatgattgttcccgagttcactcccagctcgaatgtcaagattcaggccaatgaaaacgaccctgatccgaatgcgcagccagctggtttgtccaatgacgaggaggaaatccagaaattggtcgcatctcttccctcgcccaagtctcttgctggtttccgcttgcagccagttgagtttgagaaggatgatgacaccaatcaccacatcgacttcatcaccgcggctagcaacctccgtgcagacaactacgagatccctcaggcggaccgacacaagaccaaatttatcgctggaaagatcatcccggcgattgccacaactactgccctagccaccggtcttattggcctcgaactgtacaagattgttgacggcaaggacgacatcgagcagtacaagaacggctttgttaatttggcccttccgttctttagcttcagtgagccgattggtagcgaaaagggcaagtatcaaggcaagcaaggcgaggtcacaattgacaagctctgggaccgattcgaggtggaagacatccagcttcaggagttcctcgacttcttcgccgagaagggtttggacatcaccatggtcagctctggagtcagcttgttgtatgcaagcttctatcccccatcgaaggtcaaggatcgccttcctctaccgtgagtatcttctcttctatagctagccccatgcgtgagttagattactgacattgtaccttgcagtatgagcaagcttgtggagcacgtcagtaagaagccagtccccgagcatcagaagaatataatcttcgaggtgaccgccgaggaccagacagaagaggatgtcgaggttccctacgtgatggtcaagctcacaaaataaggcgattagaatctacgaaaagccggttggctgcatattgctagtacaataggtagatttcatgactattccactctccacagactctatatgagtacaaatatgtgtagaatgaccagtgtaaaccacctgtgtacaaatcaatatcaaatcgctcaaggctgtgccaagaccatccagatcgctttgtcaaagctgatcgatcttccgataagcaaatctgactcagcatttggtcatgcccggggacgtcatgaccccgcgaagacgacatttgtattctttctatatataagagtgaattccactgtgtctgccgcttatgttctttactcttctgagatcccaaccattgaagtgtattctacgcgcagggcctcttcgtacagttcaccatagctttgtgttccccacagtaccaatcatctactcccgcaatatggctgtaagaaacacaaaacacggccacaacagctctcttggctacgctaacttatatttcaagaccgtaaattccatgaaaatcaccgattgggtgaaacccggcgacaagtcgggcgagttcaagcgtcagcaatccatctttcggaactggatctctagggaggctggagcccaattccctccagagaagggccggtaccatctttatgtctcttatgcctgtccttggggtatgaaagaacttccaattgactggccactcgatcggtgactaattatctactagctcaccggactctaattactcggaagctcaagggcctcgaggacatcatctccttcacttcggtgcattggcatcttggggcagaaggtcaaatttatctcatgagttgtggggaaatagcattgttctaactcatatcttaggttggcgatttgctactcccgatgagaaactgcccggggagaacactattcccgatcctctacacccagacttcacccatatccgacaagtctatttctccaatgatccagactactcgggccggttcaccgtcccagttctcttcgacaagaagaccaagctgatcgtaagcaacgaggtatgaaacaatcttcccaaagaagacatttccaatttcatattcttacaaaaccagagctccgaaatcatccgcatgctttaccatgaattcgacgatcttctcccagaggaatacaagaaaatcgacctcttccccaaggctctacaagccgagatcgaagcctccaacgactggatctacaacgacatcaataatggcgtttacaaatctggcttcgcgaccacgcaagaagcatacgagaaagccgtaacaacactcttctcctcgctagacaaggtcgaagatcacctcgctaagcagcaagcagcctcgaagccgtatttcttcggcgacaagatcaccgaggctgatatcagactctacaccaccatcgttcggttcgacccagtctacgtgcagcatttcaagtgcaatctgcgtgatatccgctccggattccccgctattcaccgctgggtgcgcaagctgtattgggagatccctgctttccgggatacgacggacttcgagcatatcaagttccattatactaaaagtcacaagcagattaatcaatttgctatcacacctctggggcctgtgccggatatccttcctcaggatgaggaggttagggctgtgcaggcggctgaataagggtttggcctcggaaagggtgcttcagcgattatgcccgtttgcgactcgcgaactgaacaatctaagagcaatctgagtgttatctcaaagtatgtatttgtccaaacgtgcagatttccttgtaatagtaaaaaaaaatggggaatctaaaagtcccgtggtattatatcgacgccttgccatgctgatgtggttgatggtgagtttcccaatgcccctgtatcaaagtttggtcaaaagtacagttgtctcaagtgagcgcaacataagcaataaagtaataaaagttacaatgaaaccttgttgatatatgcagaaaaaagtcaaatatcgtgatcgatgatcgttgatatggcaaagagatcaagaatgagaatgggatgcatttcagatgcacccatgagccagggggtggatgtgccatgcctttcaatggcttgtgttgtgggtatattgggacaacgcttctaaatttcaatccagtaaatagcaaagatcaatccgaaggcaccggaatgaatgcgaagatcgagaatccacgcaaatggctaggtgatgtccacggggatatgcaaggaggaagaggaagtgagggcttgttggggctggcagatcatcgtaggccgagaatgcgtttcgcgttctcgtagaccacgtagctgattgacatggccggtgccactttgagaagattaggtgtgagacctttgtaaagaccacggggtccctctgctttgagtgtgacgcttaggacttcaccaatccctgtgtatgtaggcggatgcaaaatcgtgccttgagtttgaagtcgagtgcggagaacattgagtgggtagacaatcgaggcgctgaatcctccactcatagcaccaattgcacctgtcgcgaagttgccgaggggaacgtcatcctcatggcagccacagtcacgagcctttttagctatgagtgctcgtttgaggtattcaaatgtcgatagatcgattgcggcgtaggggaacatccccacaaggccaagcggtagtcctcggaagaagccagccaagccattcttattccatacctttcttgcggtagctgcgatgagttgattgcctttcgggccacctttcacggtttcgcattgcatgcgactattgataactatgagccacaatgctctcacaactcactttggtcgatgtactcacaattttagggtatcgagggggtaaacaaaacatctagtcacaatcagaaccgacttgcctttcatagataacgcgcaagacctactgggcaaccattccaccaaagccacccgacatgaactgtgaagtgggacgaagtcgcttgggatcattgtgtccttcgagttgtgcaaatgctcgtttcgcagactgttctctggtcagtattcgtctagttgtgtaggcgaaatcgaatagcaagattacaaacctcataggcaccaaacttgatcgcagactctggcataacctttaccacgttcaagccattgcctacttatagttagtcgctgccacttcgagtccaggttgacaatatgacaaacctgcgaacaaactccgtattcctccagcccgccatagttccttgagagcgccgaacaatgttctgggatcgttccccaccgcagtcaacagggatccgtccttcgccgcctgaaccgttgatttgacgctagtctgcgcaatgagatagattttgagacgatcgaggggggcggtggccgtccttgacacggcacccgccattccacctgcaaggaagtagcctaattgaggggtattttcggtcaacttccgtccatgatatcggaaagacatccgcatggcggtagtctggggaagaggcagccattccaaatccaagtcggcgtctagcgagacaaattcatgctcgagaacgggttccggttttgagatatggctggtttgtgcgtgtgctgaaggaaggaagggggccaaggcggggagggacaaaaagttgtacaaaacgtgttggatggccggaatacaagatgaaagaaacggatgatttgtacctaaaccctgcaggtcattgatgttgacatctccttccgggtttagattgcccgtggccgtatagtatgaaaggactgcgcgtaggtcggtcggggattggagagggaggaatagaaggaaatccctaaaaaaaagagaagggtaaatttgttagcctaggatttttcagccttcattgaccagagtgaggatgcgtatacctccactcagtgtaagagatcacgccgtcatggttcttatcgacttccgcgaaaaaccggtccaacttggcgctcgagactgtgaccccggaacgtgaaaaggcattccgcaattccatcttgtcgatttctccgtttttatttcgatcaatgctctggaacatctgccatagtccgtcctcggtgcggttgatgaatgctcggaattctagtggtgattaggattggaccaaatcttggccagggcaccccttcgccgagtgatccctaggtggttctcgtgagcttaccggcttggtcgatacgtccatcaccattcgtatccacctcccgcgcgaccctgagtaccatatcgtctgcattttttagagctagaaagagattagacaagcgcagatatatagcaagaaaccaggtccaactcacgatgatcaattttctttaaccccttctttaacccattcaggtcgatatggccctctcgtcgagtgtccaaggtttcccagagtttggcgactcgtttgtcgcgttcatcttttgactctccggatgccatgataaaaaaaattgttaccgagcaaccattattttctttgatacttcgttataagaagtctttcgagcacccaagacccctagaagttgaggggaagaagatcgaggggaacataaaagtatgacgtgaggtaaaaggtatgcccagccctggaggtgaacatggacgggtaaatgcccaggtgattaatagacgcccggcgatttgaccggctttgacgccatcggattatcttgcacgggaccagggccaagccctactatccctttttgggattgcaacctgacctcatatgagatgagattctgatgttgttgctttgtttttctctgtttcttttctattggctctgcatcatctcatctcactttaatacgtgacctgggtcagcgggacttcggaccatgtcgtgacggcttccaatttacgagcgttgcactatcaaacattgaacttgcaatatggcagccaactactgggcatcatcccagcgtcgacactggctattctccagggagaagttagcagatatccgtgaaggattacgggagaaggataaagttgcccattcgcagttcccgctgccggatcagcgactattaaatatctactttaaccaacgtaagttttatcaatatggtcattgttttaaatgaatgtcgggctaattcaaatcataagagcttatcaagctcggaaaacgcatgtccaccagacagcaggccattgcgacagcacaagtgtatctgaagagattctataccaagaatgagattcgacagacaagtccataccttgtactcaccacagccttctatcttgcctgcaagatggaagaatgtccacagcatatccgctttgtggtcggcgaagcgcgcggtctgtggccaggtatgcatccgtatataaagccataaaaacagatcatatgctcactatatacagaattcattaccccggatgtggcaaagctcggagaatgcgagtttgccttaatatccgaattgagctcgcaactcatcgtacatcatccttatcggactttgtccgaacttcaaaccgaactatcactcacctcggatgaagtcgccctcgcctggtcggttatcaacgatcattatctgacagatttaccccttttacacccacctcatgtcattgctatcatggcaatcatcgtcgctgtcgtattcaagcccacccattcatccaactaccctggaaccgggcaatcggctttggcaggctctatgagagatggaggcggcatgcagatgctggccgctttgtcagataagactggatccggtcctcctcctaaaattcagaagcttgtcagctggcttgcagaaggcgaagtcgatattaaagctgtcatcgagtgtacacaagagctggtctccttgtacgaggtgtgggagcaatatagcgagaagaactgcaaagaattgctcgggcggatggtgaagagcaagaacttggacaaatgatcgtgtaccgcatcctgtactttacaaaacctttatataccggtatctcaatattcctaatctagttttgacggggtttttttcctttcgtggacatttgtcatttttcattctctctctacctagcagcatacgactggtaaaagcaacccgctttctttatattcggtaccccccgcatctcgtcttaggcaatcatgagacgaatccaaggatttcgacgcgatggtgttccaacagaaagcttgtatgagagaaaactggggggaatgcaaggaagtggtttaacaagaaacaatcagatgcttaattgggtctaatgtgtctactataaaagtattcaaacgacgatgataccaccgaggtccatcggattgcatagttcgagcagacggggattccgtctcatcgaagctaccagtgccaattgaaacccaagatacgggctttgatttaagaattaccaaatagactgtacagcgaagaagagaaagacgtgaagaagaggaaatggagggggggtttatactcgcaggtggggatgtcgtgccatcctcgcgcctgcccaatccatggacagcttcatggcagccatagatcaccatgattccggtacggcaaaatggcatatcacataggcatggccctaactccgtactggattcaaagttggatttgagatcttctaggcaaaggaagcggttattcggcgattgagacaagttgaacccttaagccaagaatgaggccctttgaatacctgcattccaaatatcgttttattacactctgagtaaagagattaaatgagtatagaaatgctaattacacacttaactagtcagttaggtgtagcattgtgacctgacaacctaagacatacatcttatcaacagggcgactccaaaggtctctagggctgcatggaagaatttctcaagagataaacttaatcgaaataagaggtttgtcttgctgtcatgctgtcattctgtcaggatggcatcgactccgcaaatctatttcaataccgcccagagtctgaaaccaccttccgactcggagcacagaaacattcgccacgatgcaatagatatcacatatttaaaatccaaccagggcactggaatagttgaagatcgtgtttgccagtcccttgcgcggtgtatatggggatcggctcgcaggaataactagtccctcaccgaattacatatttcatgcattcggaccccacgatctcacacagacaccaaatcatgcgccctgcatagacgctggatagatcagctgcatggttcaagcctcggggcaacgtttacggggtacaatatgtgatctatcctacacctcaagagatcctgttccaatagccagaagggcggtgaaaccgacaactggagagccagcttacggtggtacgttgtctctagtaaagatttttttcggcgccgtgtaatcgaattgaagttatcactggtggaagatgaaaggtcggcacatcgtgtcacagggttatgtcccagtaggcgccgagagagtgggcatatcccaatgagggacaaaggacgaaaatacatacaacgtaggtaagtgaatacggaaatagctcccagacctaaaatataccacacgttgaatagtggaaactcacagttgattttgattcggtcgcatgaatatgtagtgagtcacggataggcaatggtacccgaaagaaaacaagagaaggcgccttaagcctctgccctagtccggattccgcattgatgaaccccgatttgggaaggatgtgagctgataaggtaagatctcaaggtcctctgccaataataggcgggtttgtctgcagctggttctatgggtgtgtctcaagaccaacaaggtttttttttcgggtctttgcgctgcgtgtcgaaggattggggaatttgtacggggagccgatcccaagcaagatcagcagccactgccgattcggacaccctatagggggaatggagggggaatgtgcctgggaaggttaggtcttgccctgcacagcctgcagctaaggggacccgaagggctgacaaaaatttcagcttccccaaccaccccccgggttgaggaaccttgaacggaggatggggaatttacttttccggacagcttcactgcatattcgatgatacatcatctgtattttgtccaggtcggcagtttggcggtttcggcaaatgtcggatctagataaaagcaacaatcatcattgtcgtacggagtagggcaatgctagaggtctccagatgcgcttggtatgtacacaacgtagtggcgtcactaagagatcttcctaatcgggtaaggtcccaattgtcgacgtcacgtttttctttttcagtattttggtgggccgttggagactccacttggggacgatatgcgggctctcattggtccatgggctattgccactctggctagcgcttcgatctggttggtgcgtcgatgtaagtgccttttccgccatgacaataccaaacggtaattatccacattgtccacatcacacacgcagtccactcccttaaatagtaatggtaatgaccgtaaccataccatcccccccatagcacacccctcccctctttttcccttcgcctcttcccacacacttctcattctcattaatcctcctttcctcgttcaatctcatcgatctttcctatattttctatatttttctttttgtaactttcttcttatcttcaatcttctcactttcgagtgccggcttctcaatacaatgtctgcctacttctacaaccaacaccagcaacaccagcaacaccctcaccatggtgcccatatgcagtctgcgtcaaatacccaccatgggcgctctcgtcgtgccccaaagatggcctcgcaaaatcctcagcgtcagttccgaggagtcaagagtatgcgggaattggcggaagctccggctgtgacagccttccgtgcaagattcgaagctggtcgatcctttgatctggatgacgacctcgagttttgcccaggcctcctaaccgaggatgatgtatgttgtgattggcgaattttcaacccccttatattcgtcacccccttgaagatcgtcacagatctcaatttggatcgaccattaggggcagttttgttaacatgcttgatttatagctacactccatccactccgcatccgatcgttcttctctctccagcggctcaccggacacctcgcctctgcagcaccaaatccaaccggtgcagcaggtgaccccgtccatctcattgtcccccgctcaaaccaactcatacgttcaccctggtgttgccggcaaccctaatcatgtcaactaccagcagcagcctgcgaaccggacccgcaaggtcatcccgattatcaacccctcaaccggaatgaccctgtcaagcccaccttcatcgatctcgtccgcgatgatgcagactgctcagcgtcgatggtaagggtgccatttgccaaagtcgtaggctggcaccctacatctccattcgtccattgcacgtccgttgtttaagctgttctgcatcatcggggtcccttaatcgcaggtcataatgtttcttttttttttcctccacttgcattcttgttcgatacgtctattgcattcgacacgacacacaacctggaaaaatatctgttccacgaatacggcgacaaaaaaaatcatcaaaattcaaaacaaaaaaaccgacctgtacatacactctcctcttcgccgattacgaccaccttcgcctcatattccacatcctttgcgatactcttagcttgttgcgagcgacggcgcctgcgattcaataccttgcatccttttcctacgatacctctttcgtctctcagggagggacgaatactttcttcggcctatgtttcttttcttccggtcgggccaccgatgatgtacagaacacgtgcagtgacattgctacttgaagttgcatgttcatgacttttggagttgattctaccttttttttttgggagggttttgcgtgcaaacgactttgccagatatacacctacgctgtggcactttattttctttctacgatctctttgtttgggtttgtttttaccggggcgggaatggatatcattttcaaggatctagaggcggaaacgatacacgtctgcattgcttgggcactgttgaatatcttgggttgctttttattgctttgttacagtctacttttctcatcttttacggattgtttctctgtacatggaatttggggattggtgaataacgcttccttgccactggtatgtggtcggttgggtctggtagcgaaaccattggatgcggagttgtttctgtttgaaatcgatatccttgggggtctctcgcggtgtgcgagtctagaccgttatgcacttaaaatgctttcattattacccttctttcatctcttccattagctctatatttcttttattgccctttttgggaactcccggagagttatgacattgtatgatgttgatttgcgttgattttgcatactatcaagtatcgtcttgggagtctggctagactgggacgttgtagattgtacttgattcctgctagacatgtagatgcgtctccgaggctcaagccttctactccgagccattccaacaccaaacacagccatctcaccgcacaagtctgtcactcattaatcgacttggttcagagatggtattccaaggtcaggggtgtggttctaaatttccttttccttttcttcatagatccgatcaaaacttctcatagataatatatcaagtggtgcttggaaaatatgtaagaacatgtatatatatggtggacaaatgcctcgctttaaagaaatacccacggagtactccgtgtgtctactaggcctgcgttccttaaactataaaactaattacccaaagtcatgatcagatctctaattaacattggacacactcaacattggatcgcccgaagatcaatatgagccaaagataccattgttctatgccaacgcaatgccaccagagaagcaaaactacaaataaaaaagcaagccacacttaacatgtcacaatgggaaatcttcagtgttttaagtacggcgtacatcccatgattgggtccctacccgctggcccttgtttcaggatcaaccaactatatcccaccaacaggcctttatttcctctgccacttcttggccttccatttccatcttagtgcccagtacctatgttggaagtagtatcaaacccacgcgcccaggacagccctccccacttatctgttacggagttagtagggtactccgtatatagatatcatctgcgactccgtactatcctatctgcgactccgtactatcctatccggcgctacccccgagccccttacctagacctgacacatccccggccccacggagtatacgtctttctagtcttggactgatggcgtctactgtgaagcatgcccagcttgtgctaagggctctgcagcgcagcgcttgcctccgataggttggtttcgaaatgccaagcgctcagaagcaaacgcttgcactacaagatacgtgctcatttcgggtcgttcttgcctttagggtggtttcctcctatgaagtttcactttgtcttgttgatattgttcttatttttgtttccggtctctttgttttcctctcttctcttcattgtccgcattgtctacattatattgtactcttttctttcttttccattcttggccgcaggtattcaagtcaggactactgcctgctgacgttcattttgagacattggcattgtctttccattcattcagaacgagcctgctcgtacagatctgctgaaagttcaccctcttgtcttgtctgttttttttttcccttgtgtttcctgtccattgcattctttaatatcaagtcttcaggctggcctgatctaatcactcctttttctttccatttccacccccatattggggctttgagcaagatgcaattcattctttttctcgctgccttcttttcgttgagcttcaatgctctttccatgcccgtggctcctccgaatcaccttcaaggccggtcctttaaggtgcagagagtcaagcgcggtgattatgttcccaacggacctgcggcactacgcaaagcataccgcaagttcggaattgatgcaacaaccctcaatgggttggacgtgagcgacttccaaccttttgaaaccacggataccacctctgtgaaagttgcaaaggaagatgtagcagatcctgaccagacgggcaccgtggatgccacttctgttgatggagatgtggaatttgtctcgccggtcaatattggaggtcaaaccctcgacatgaattttgacagtggctctgctgatatgtaagttttgtgtttattggagagcaacatgtttctatgttccagttcacaaaacgaatattccgagctaaccaattgtgatataggtgggtgttgaactcgagacttccaaagtcactgcgaaacggccgaacagtgtacgaaccgagcaaatccactacctttgaagagctcgccaacagcacattcaatatccagtacggcgattcttcctatgccaatggtggagtaggcaaggatgttgtttcgattggcggtgtcaaagttgccgggcaagcattcggccttccgacggaaatttcgcagacattcgccgatgacaccaagtctaacggactcgtcggtcttggcttttcttcgatcaacaccgttctgccacagcgtcagaacacattcttcgacaatgtcgctcccaacctcgacgagccggtcttcaccgttcgactgctcagcaacggtgtcggtgagtatgaattcggaaccgtcgatccgacaaagtaccaaggcgtcatggccaatgtcagcgtggattcatccaacggattctggcagttcgactcggcacagtacgccataggagaaggccccttgcacacgatcgccaaagcaccccaggccattgcagacactggaacctcgcttatgatggttagccctgaggtcgcggaagcgtattataagcaagtcgatggcggattatacgccaataatgccaatgggtatatcttcccctgcacctcgagcttgcccaccctatccgttgcgatcgggtctggttatttggttaccgttcctggatcgttcatgaattggtccgaggttggaaccaacacgactactggagaaacaggtgagttttcttttctgtccgttcaagcttatttgaagtatgagttctgggctaacctttttttgacagtgtgctatggtggccttcagtcgagcgggagctcaaccatggcgatctatggcgatgtgttcttgaaggctttgttcgtggtctttgacaaacgcggaccttctttgggattcgcagcgcctgcttaagcaaaaaaaaatccgagatttatccgcccctcaatttgtgacaatgtacaaaaacccatgttttcatcttttcatgtgttggcagcgatgcagagaggaagaaatcccatttagacgcacaataataatacggaaactggaaatttgaattcttcatattctcatgggtatgcgtttagttttattttcagatataccgaacacttcacaccccctaccgcacagtagcattggccaagctcttaacagtacaaataccaccggaagcagcaaccagctttccaagagcaggcttaccctcctgtccatggacagcgggaacagcactgctatcaaagacgacctcacggtccgcagtggtagtgaaacccggttggaaagtctcccagatcttcttcttcgggttaagctgcttctcaggctggccatcattccagccctcaaagctaatccgctcaccggcaggagcatcagcaggcgggttaacgagctcgataggaccggcgtgcgagtcctcgccctccgcaacacgcggagacgcagcgagaaccatcgcgcaagacttgacaccgcgcatggtcacaggctttaggttgcacacagcaacgatcttacggccctgcatctcctcaagcgggatcagtccgttcagtccggaacacacggtccgcacggtcttgccggtctcctcatcgagagacgtgttctcgcttcctggggcgtcaccgcagtcgaccgtggacacgtacagcgagtccgcgttcgggtggttgatcgcacgcaggatgtgtccgacgcgcaggtcaatcagtgatggggctggtggcgcagcgggggcaggagcgggcttgggtgccttctctttcttctccttcttttccttcttgttggtcttcacgggggcgccgtcggcgccgacctgagctttggcggcttgctcggccttgccttggccgacgacgaggggcttggactcgttgttggcgtcggggttctgggcgctagccttctcccgcttcttgcgctctttctcctccttggggtcgacgggcttgggcacgaacttgacgtcgttcacgtcgatggcgatcttctcctcatcggggatcttgagcgagaataggcggccgttctgcacgaagtcgacgtgacgcacaatgtggtggtagcccttttctccggtgcgctgttcaggtgtccatttctcaacgacgggggctagaagagcatagatggcaatgtcggccaccgagggcttcgcaccgaggagggtggtacgggtggtgaggtgaatattcagctggtcgaggatctcagcggtcacatccttttggtcattggcgagagaagtcttcaggccggagacggtgtggagccattgcctgatgtcagcttcctcttcctcattcaaggtgacctgagggaagatcttggcggaggcgtggaggtagtcaggctcggtcgattcggaagagattacggcggggtacgaccgatagagaagggagaggagagatgtctcaggagctgctgccgtcgccatggtgtatgttcgtggaggggttgggagtggaagaagagaaaatcgaggaggggcacggatttgagtcaacgattggacccgcggggttgtcagtcgggcccgcaatagagtagacctgagagaattcagcttgacgacgatcccttttatatagggattctggtggaattttgactgttaatttaatattaattcaccaaagcaattgcctgatggtttttgtttcctggccgtgctgcgcttgctgactcagcggtggcctggccagcccttaattagcataacccttcctatcttacggagttcggggtcataatctgtccttccttcatgccacttacagcatagagatagacatattatcttctggcagcatgacacaatcaaatgctaggactcttccaaaactgccagcagaagcgatccgtttggctcaccttctcgatagcttctttaaaacaaacaaaacatggactggtctttcgcaccctgaccagagagttctgattggatttattgcgcagaaatatgacatggggtctactctcgcggccaatcatattacccgctatcctagaatatgggcacgcgaggagcaccgagtgacagaagcgattcaaaaaacggttgatctagcctcgccgctactggatggaagtttgagatcagttcttaaggcgaaatccatattttacatgcccgtcaagctgatggagcttattgtgagtgatctatcagacagcgaactttccaatctttgccgagcaaatcgtgatctctacttgagtgggtggctttctcggcgaggtatgcaggacttgcgtgcatttgaacgaagcctacaaggaaatatggaagaatcattcatcaaggcagtcgaagcactctttgatgtcccgtagacagtgtcgtgggatacaactccattatatgacatggtgaactacgaaaatgtcggattgatacagttcctggtttttaatggcggcttgcttgggttagaattacaaacactcattcagaccaccctacgacatatctatcaggacagagaggatagaaaggagtgcgaaccactgagaactgtttgacgtggggggctgatcccaactatcgttttcataacggctgtccttggatgtggcatgctattaaatcagcgtcggcggaacgggaccagcaccattcatggacaaagcaagaaaaggcgtgtcgggatgtgcagctgctgcttgaccatggggctgacccaaattctgtggggtctttggcgacaatggattcgatgcttcatgtagcatgcctgcattttcaacctcaaatcgtaaaggccttgctcaaagcgggtgcacaccccaatgcaaaagacgcgcgtggccgcacacccttgtttatgctattcgaagaatgctggcccaacgtacatcaaaatgaatatctgcttgatatgtttcttgcagacccaagagttaagattgatgaacctgacaatgatggctgtacgcccttgggcgctgctgtgagttgtattgcaaccgtcagtcgggaatttgccaagaaagtcgttcgtatgcccgatgaagtcgatatcaattcccaagacataaacggcgaaacaccattttctcggactatcgccgtcaacgagtatgatataatccgtctactcctggcgtaggatagacttgaccccaacctcggtccgacagatgcatttccgtcatttcttgctgttcgtcttaatcaacaacagacggttgagtatttgctggactctaagcgactcaaagtcaacaagcaaactaacacagggcagaccgctttgttggaagcgattcgtgtaggcaacacagatgtcattaggatgctcgctaaagccggtgccaacgccgatattggaatgagtgaaggcagaaccgctcgacagcagatgtcggctgcgggtacttatatcaaatggaagacgagctcgatatgaagatcaaattctactttgcttgctcctttgcttctgtgtttctataaaagggtgtttatctattgaaatcaaagttgcaccttcacagaaaagtctctagtcaatgttccgtacggcaattggaatctgatagtaaattatttgtccactttgacatggtagtctcccgatgtgaagagtggtatataaggatgtcatgagcagaaagaccttgatttaacgcatacaatgagaccccagatgaagtttccagaaattaaattgagaaattagacctaaacgattctagcaaccctgcaccaaccagaaagaactctgagtcctaaattaatatagcaataaaagaggatacaaatttgactaatatcgtcgactctttttcttccctttccctttcccttttcctcctgctctttttctcttgcgtgggtgcattagctgctcaagattgatgcccgtccgcgaaatcgtttcctgtgcagtcagacccgtgctatctcgaatgtccagctgagcaccggctttgataaggagtttgatgatatgccttgtagttggcaatgtcaaagcgagacgcccattgccatctttccggtttgggtcggttgcattttcgcttagcaatatctcgaccatcctttccattcgctgcgaaacggcgaaaaacaagggcaacttcgtagtattgagattcgggttaatattagtctgcgacagcaacagctcggtgactcttttgtttcggctcgctaccgaatgatataataccgtcctcccatgaatgtcttgggaattgatatcaacatcggaattttgaagcattctttccacaaaccaagtagagcaggctgtgttacggccagcagcaatactcaagggtgtacggccattctcgtcacgtcggtcgaggtcgattcctgtagcttgaaggaggaccttgattgtggccttgcagggagagtgggacttgacacaattatttcgaccaacggccatatgaagaggcgttttaccattggggccaattgcgtttacattggcaccatacttgatcaattcagtcacaatttctgactttctcttggaattgcaaaggcagacagtcacatgaagtggtgatgttttgtcggatatgtggatatttggatcagccccgtgttcgagcaacaggcgaacattatcgacgcttccgggccgctttgaaatcttgtatatgtcgtgctcatgttccgtcgaacgctccaaaatatctgcgcaaagagcacggcaaccacaaatagcaaccaaaagtattggaatacgcccaagatccaagtcgcgaagggtgggccaatcgctggaacaattcggatcagcccctagtttgaggacttctttaacagacagatgtttgggccttgactgttctagattgtcaaacagcgtgtctatgaggaattggcgatacaattccccaccaaacccccctttcgaagccataaactccagcatatgaatattgttggtgttaatgacatgaaacaatctccacgtgaatttatcacccatacttcctgccatattcgaaagttgttcgactgccttctcgtaaactgtcgggcgagtgttattcaagctccatatcagtgccttgatagttctgtccagtggtctccagagcttaaagccgatcaccttggagagacggcgattcgattgacagagtctaatgagagactctgtcggtaactgacctgcaatgagctgcaacagctcgttaggcaggtcaagtattgatgttgcgaatacttgtctcttccaattataaaaggcatctgtcatgaatattcgcttggcatctctgagaaagactcgcgctgcctttcgccctgactttcgcgcttgtcctccattggtcaaccaccaattcggaaaagggcatttggtcgatgcaaggattcgagagctggaaatagacatgtcagagcttccgatactctttccttgctctgaataattcaggacgatgaaatagatcagctccacctcatcgggctggatcttgagggaccaccgagggtttgcatggaggaatccaaaaaatttgcatgctgcattgattgtcgcaattgacgtggaatctaatggagcaaggttagacaacgacatactgtgaaaaccccaggtggatgttggagacgtgtctcaggaaggtagatatcacaataattcatatctgaaggctgtagagctgatcatcatgcaataatccatctttaccttggtatgatatcttgtggtatgagtcgtctttaataccatagtcacactgagcttattatggaagcttgtcgacctcttccttagaaggatggccgtctagaatgtcaatggcacctgttcaatggtagattaaaggccttggcggttcctatactccgtagtgcccagcgtgtcttttggcgatcttattatgcagtctaatccgagcttggatgtgtagatgtaaccctgatcaatcttccaaggttggaagtgtatgtacatcctagagtgcattagcgtatctcaattcttctctgtgattggtcaattgaatgacgctaaaatgagtcataatgagtcgtggaggcacagtcgatcaacaccaatcacatgacgcttactgtggacccatgtggtgctgcggttcatcccttggtcttcggattcttttatatggcctggcctcgtccttcaactcatttcctcaggacaccactcctacagagttggccccctatccacattcaccctagggtccccttcgtcattctcctatagagcgtcacgggtctgcaaaggcccgtctaagaaatccagcgatgcccgcctgcagttgttcgagcgccgcggcagcgatccagacctccgtccactggttccaacccgccctacaccggcacgcaggaacgccatcaagggcctgctgattattcgtcatgggcgaatcttcatccgtacagtgataacgacctcttctcatcgctagcgccgccgctggaaggctttccctcggctgtgccagtctgccaatccgttgacgccctcacacacgagtcggcactctgggcagaacccgatctgtcctttgccgatatcgactggaatttcgtatctgtggatgttccgacgccgtaccttcctgaccacgacggtggcgatgtccccgtcatggatctcgggtatgggggtctctcttctttcaactctctttcggattccggatcaatcgagcaccaacactatatctctacgtctcttgctcctagctccgccaattcacaaggtaggattatattctccagtcaagtcagcggggtctagtttctaacgtttaaaagacggccactcgcatccttcccctatctcttcgttgactgctcccgtctcgacctctctctccagcccctctacctcccagggcgatgatactctaactcgtgttgattcgtcacgggtggaaaagcgtaaactcaacaccctcgccgcgcggagatgccgccagagacgtgtagatcggatgaaggaacttgaagcagagttggagaaggttcggaaggaaagagatgactggagacttcgatgttcgaagcttgaaggcgaaacggatgctttgaagggcctcctcactcgcaggagcaaggatacatagtaggatactcgaagattggagctggtctcaactaattcaattgattttggaaatccgtgtctttgtctgttataagcactattcgtattccgtactttcgggtgcagatatgccgtcaaacttgtccccctacatcggtattgatattaaggaatgctagttagtatgttgtacggagtagttgtatatgttatgctctgtagtgggatatatatttgttgttttacaaaaaaaaagctaacatattcgaggaggtttgataccaagtccctatatggaatgaataaggaaagttcaaggcgaggtttataagatgcatatagttatgctgtatgcaactacctaagcgggtacggagtatttctaaggctattacggaggtcacttcagagctggccacctcgggattagctttgtacaacattagaacccgggccgtctactagaacccgggccggttattgggttgggtacaataccccggcccaatgcacagctcagcgcgagttgggccccacaggtttaatgcaaaaactacatagtctaatgcttgacataggtaccttttgtatggggccatcatagttatatgtcaaaaagatttgtaagtgatatttcctaagcagactaaagggagataagacaatattaacatcgaggttactttaagattcgggaacaaacataagcttcttagagagtctatgtcgttattatgttaaaagggatcgcactttgaaggacccctccctagacagcacgttttccttttcagaaattcctaaataatggaattctcacattatatcctctaaagcttcgtttatttggtatctatttatggctgagaaatgtgattttgaagagattgtaaaccttttgcataacggccatatacggagtgtgaaaggtaaacatatcaagaaacttgcattagactatgttgtacatagtttttgtgcctaattccgctgggccgttccgggtatgcctaaccgatcgtaacactcgcatatatttaatgaggacatttctttatatcagtgtaaatttcaaccctggaatctctcaatatttccatcgacaaagttcactcttcggcccgttccacacaagcacacttacccgttaacccaaaatccattcatcatgagagctgtacgcttccatggacgaggtgatatccgcgttgatgagatcgaagagccagtttgtggtgatggtcaggtcaaggtaagcttagcattcatgtttatgcgttcgcaacgttacctccaatattctaacaacgaaccttgatattaacagattcgacctgcatttgtcggaatatgtggcagtggtcagtaacgtgcgacccaccgttgactagccatttctaatccaacccagacatccacgagtatcttgctggcccaacgatcgtccctgccaccccacacccattgacagaccaaaagctaccaacaacactgggccatgagttcagtggtacaattgaagaagtcggttcaggcgttacaggattgaaggtcggggatcgggttgcagtgaagcctaacctctacgactccacatgctcaaactgcacagtgggcaggttcaattgttgtgagaaagtaggatttatcgggttcagcagtaagccatactaagtcttgtacctatgtatcgatattgacagctacacaaggtcagtcaggtggtctatcggaccacgcagtcgtggatagcagacatgcaattctgctacctgactccattcccctcgatgtcggtggtaagaatgaaccatttccaattcacttgtgttttacgtgtttcagcgctgacggggtgtggtggtgatacagcattggtggagcctcttgccgtcgcatggcatgccgtaagccgcagtcctctgcagctaggcgacacggtacttgtggttggggctggaccaatcagtttggctatcatccaagtactgaaagccaaaggtattacctcaatcattgccgcggaggtctctccgcggcgacgtgaatttgccctggccctgggcgccagtgaggtctttaatcctattgaagtggatgtggttgcacaggtacttgccttgacagacaacgtaggtgcagctatttcattcgagtgttccggggttcaggctgggctcaatactgcgatcgctggtctccgggcgcgtggcacgacgatcgtcgtttccttgtgggaaaagaagcctactattgatgcttctgccttcgtattccaggagaagcatgtcacaggagctgcgctttatgatgatggagactttgaagctgtgattgctcagattgcttccggtatgtcttgtttttacttcctaattagatactctctgctgatctcttgcttctttgatataggcggcattcagcctcactcgatgatcactagtaagatccgaatggaggatattgatgagaagggattcaaagccctcatcgaggagaaagataagcatgtgaagatcctggtcgacatttctgcatgaatcacgcggttagctcacatgtctgtatacatatttcaattttgaattgatttttatgacttttatttacgtaatattcaacataactcggactgtgcgtcaacctttatgcacgctagctacgcgatataaatgggggatggtctagctcgatcggggcgaaccttcggaagtcggaccttacttctcgtctgagatccggtactgtgtaatccagtgcgaatccgaatcgggctcataactatcgactaagccgtatccgtaaaggtatatatcttttccccttgctccaccacccgcttttccctcaatttccgtcctatcatcgtcccatcaacgaagccgtttcactgaccatgtcagatttactttctggggcctccgtcatggagaccgcggcggaagtaattctgcgacctgtccctcccctcatccagataaatgatacgcgttatgtctccaactcatctgaggttatctcgttacggtttttccatgaatgacagagctttaaacaggatgttctcgaagcatccgattctttagatcttagccatcctgtgccttacacagatgatgtgtcagaaagctacgtcgttggaagcggacttggtttgaccggaaggttctccaagaatgtttgtgacccagtttcgaaagtgtttgccactacttgcctctcccacttgaagttcggtgattatcagtcctctgcagggccaacggacacgagtcaagtgcctcatattactatgttcaacacaatgggaccacctcgcccagcggctgtcggagaactaaagtctttctggacagttgaacttgaggactattccattcgcgaaggctatcaacggttaatcggcatccagcatcacattggtaaatccagttgtcaggtgtaacgggagcattgacagggtaagatcgtactattaacatctgaacaatgctgaatgtttgtgactatctgtattgtctattagattccactgagccgaaacgtataccatagtgttgtataggtgcagcccccatttcaagcgatggtcgaaacatcaacaaatgatgcttctgctagagtaatacaacgactacgagctcgcagagttgggcagctcagctcgcttgcgatgatccaaatgctccagcttctcggatgtcttctcgctcgagtccgagtcctcgcccaataaagccagtaagccaatctccctctcgatccgacgcttcaggacctcgtcctcaacggccatgcttccggatccgaacaattcatccatctcttccagtgtgcgacccttggtctcggagacgaggaaccacacatggaggacaccaatggtggtcaccaggccgaagaagatgaaggtaccgtaattcagaggcttcgataaagggagaagttgacagaccgaccgcgaaattgttgagctagcatcctgtcagaactgtataagacgcaatgaagtgcacatatccagttgctacttccaccaatactaacaccctcggcgcgcatactcaaagggaaaacttccgacacgacaatccacgcgacggggcctgcttctgttagtgcgtctgtcagagtccaaaaattggatttaccccgtgcgtacggaatatgcaaagttgataatgaagatccacacaaaaagaccacggcagcccagccagcccccttatggttctcgaattcgcccgagtacgcagatcggtcataaggatctagttaggatctagttaggatctaatcaagtgattaaatcgttagcaatacacccaatatatttgacccgtgaccaataaagataaaatctaaggacttcggttaaagctctaactaattatatccattattctggaatttaaccctaaacccggttacaatataaactaatatatataatcttggaactatcacaacaggtgccatggtcatataatgacgtgacacatcgctctgtccgcgggctgttagccctgcagcccccggtcgggtggcgccattgatttttgattttgtattttgtattttttggggctattttcgtctgaaactgcaattgttttggctttgtttccttttccttttatattccacgaaacgtccacgcagccgcatccaaccagatctggcaatgatcgattataaaatcttataattacttcgcagcacgcaataatacgaatagcgtggggtgatcctaggcccttggctggctgactgtgttgggggcattgctggcagtggggaatgagtgtgtttttagttgacgcctcctggctaaagatccgggcaatgtcccggatatgtatggacgtgggctcgagaccttgcccagatctttagtcggggttggggtccatggtcgatgttgatcgggtacgagattcgagatgggtttgcggcacaaggacgccaatggtgcgaactaacctacttcagcagtgtcgatccattgtctcgagactctccttgtgttctaattttacggcatttacggagtacccttgcagtactccgtaaaaaaatttagtcgccgtgccacgcatcaagaagatcataggctttcaagccatttgttatttggcactaaccttgggaggcagcacgtccccagtgttcgcatctgattgatccaatatcgtcaatatcgtcgttttgtggtaaacacgcctcagccgtgagctgagacagacaccgctaatgtctgatataattcattggcccattctactgcatggatccatagggatggggcgggttagagaatttttcgatccaacctcttaggtatataacacctttcgcttgggctacgcttggacaaccccctttttagttcaagttccctttgtcgcgcaatattttattgtcttctgtcgtccctatatttggagccgagtacccagcattacaagtgcttgaccactttttcttttctacggtggaaccctaccgacgtttataacctcgggaaattcttgcctaaccaaaagccggcgacatgggtacaccacttacagaaacagtcattatcactggtggaaatgggtgtttaggctcagagatcgccatcgagatcgcgaagaagcagcctttcgttcatctattattgacggcacgggatataaggaccgatgacgtccgcgacctgatggggaagatccgtttgatcggccctaggtcaatagaggttctcactcttgatctgaccgatctgaaatctgtggcatgtttcgccaaaaccaccgtcactcgtgttcgctccagagacattccgcctgtgaccaatctgattcactctgctgtcgctacatcttacgttatcgatgagctcacatcagacggctacgacccggtgtatcagacaaattgcctatctccatttttattgaccgtgggactgctcgaggctttccgggctggagatggtacaccaaaaggcggagcgaaggtgatcctcatcggctgttctgcgacatcttccggggaattggattacttcgaccgcgaccatggaagaaacggaaggcaaccgggaactgcgctgagtgcaaaggaagagaatattcgttttgggagcagcaagttaatggcgagtgttgcattatatgcattgagacggagcctgatttgggtaagtgaacttgatcggagtcattctctcgatttccaatgcaaactcgtacagtttactaataaatctaattatagaccggtcatatatcgcttgacatcttcacactggatccaggaggcatcactggccagagtaatctgcggaccggggcgcctatgtcggtcagagtcgcacaccagactcggtccgggcttcggccattcctgcgtatggtatcccgaagctccatgaacaaggccagtgttccagccaaggcaatcgccagagttgcattccacatcgacacggtggagaactggcaaaaggaacgctactttattctcgacagcgagtacgaagccgcatccgtcttgccgagcctgcgtgatggggaaaaagtgaacaaattattaatacagatgatgcaaatgatagaggtggaaacaaaggaggtgaattctcctcctattccacctcaattaagcgtcatcccgcctcctacgctttcactgtgaagggacggacaacacatttttagcattgggggaatactttttttttatatgaaattagcgaagcgaactggcacagccaaagcatttaatctgttatttaatctgttctttaatctgttatttacttcaattatttctagatcatgttataaactgcctataacaggtggaaaccaggtacaattccgacgatgatcgcaagcggatgaccggatttggtgaagaccgcgacagctgcgaggccttcgatcacctcaccaccaggtcttccgaggtcctttcgcttctgttctgttcattttttgatatttcaatccttccgactttctttttctttcatttaagccttccaagtctggcctttaaaatcggggttgtcagaaggtctccggccgctacatcagttcttggcccccgacataagcgccccaacggcttatgacagcgcccgcagtgatgaaccgacacgtcctcgaaaagggccactctgcttaccccaggggctcggcattttcaatctcaccgaacaggtaagccaaaccacctagtccgatctaagtggcccctttcccattgtccaagcgttcagccctgtcgtcatgccagatcatgaagcttgagatcgagactgactagtatgcgcctccaggttccagcctcgctcgcaacctgcccttcggagacgccggcagctcatccagcgcctctgcctccttggcggtgtgtcaatagtgctcttcctcttgatcttcccatcctggcgcgccgccatccttcccaccatctcgcttggccttatctcctaccccggagatctacacctacagacggtccggtactatgatttatcggaagtgcaagggacggagaagggctgggaacgcggagagcgtgtcctgatgtgcaccccgctccgagatgcctcgtcgcacctcccgatgtttttctcgcaccttcgaaacctcacatacccccaccatctaattgatctggcattcctggtatcggactctcgggatgataccctaggcatgctgtcgcgtatgttggaggaaacacaaaatgccacggatccgaaaatgccctttggagaaatctccgtgatccagaaggatttcggacagaaagtgcaacaggacgtggaaagtcgacacggattcgaggcgcaggccagccgacgaaagctgatggcgcaggcgaggaattggttgctgagtgcaacgcttcgcccaacgcacagctgggtctactggagagatgcggatgtggagactgctccgttcacaatcattgaggatctaatgcggcacaacaaggatgttacggtacccagtgagtggtgaatattgcttgggttttgtgatctagactaattggcctcgtctgtagatgtctggcgcccgcttccggattggcttggcggagagcagccttacgatctgaactcctggcaagaatctgagactgccttggcgcttgcagataccttggacgaagacgctgtcatcgtggaaggatacgccgagtacgctacatggagaccccaccttgcctacctccgcgatccttacggcgatccagatatggagatggagctggacgggatcggaggtgtcagtatcctggccaaggcacgggttttccgtgctggtgtgcacttcccagcatttagtttcgaaaagcatgccgagacggaagggtttggcaaggtaagacagcaatcaacgaggtgggagttataattgctaattttgcttagatggctaaacggatgaagttctcggtgattggactgccacactatactatctggcatctttacgagcccagcgtcgatgacctgcggcatatggagcaaatggaggtagagcgactggctcgcgaaaaagaagaacaagagcgagccgagcaaaaagatagcacccagtccgagtccgtaggtaacgatcacactgtgaaagggggagaagtacaaggctctgctgaaggcccggctagccagcccgtgaaagacgccatggattctactgagggtcatttgaaagctcaagctgagacagtcgaccaagccgagaaggtcgaagtagtcgagaaagcaaatccatgatcctcgactggctttccttcaccgcttctttgatccagccggctggattacgcattgcattctcacatgcgacttgaatgtctcatctccctgggaagactatttgtctgtttagattagggcatatttatgcccaagctctgcaagtgtaggagctttgcttttcattcttgttctgtttcttgcacatgtcttttatatctttgggggacatttctctttccacggcgtcaaaatggaatatagtggttggcgtgttatggagatcaataatttgactattcaagagcaacacatacaagaattgtacgcgtatgtggtctctattctagactaagatgatataaagaacgttttatttaagattatcctacgttttctgtttaggttactacctatgggaacttgttccccgaggatatagcgtccttacaaggtcatcccctcttttagcgcgtcgtactgcattcctcaaattatctcgaacgaataacacgacatctgttaccggagagtcctatattaatggcacaactatgactactacacagctagatctacccttcgacaaggttgttggccgtcctcctcaccaacccctggagaaagacttagtgataccagagtaagagctgagaagttttgccgaggatatctggagtgagcagagtctcatataagtcgtttcgatcctgatatgttcgttggccaccaagcagcagacatcatggaagacgatgttatactcacgaaggacgtgttggttcgaaagatttctggggaggtgcgtggctgctcgagactcaagccagggtcttataatattcgggcttaattgctgatgtctcacgtgtttatgctgatgactattctatttgtaacgttacttgactatcgtgggcctctgtatgatcatattgctactttgtctgggccatctttctcccttccttcggatctgattcgctcccgggtgccccgctgcggcagatacaccccatattgttgggtgcagaatagggggcggtacagggcagcgggcggtcaagcggcaactcgccgtccaaagttacgggtggaaaggcggccgtttctgacgccagaagctgtcattttcggcgtcgatttcacaggtccccatattctatgtgtaatatgtggttatttgattggtgtaacaatataaccaacataaacaattccccagggctcaaatgaagacattcggatgaagccgaatacttcttaggcggtggtccgtgtgtctccacttcgcgtcaacgcgtccgaagtcgatgcggcatttccccgattctcactcgtcttcgacttgcatactctatgcacattgtaagcctgcaatgtctactcaagcctcgagcagtattcttttcacccactttcgcccccaggaaggcttccggttgctagagctgaccccggagctggaagaactactgacatcgaaagatgcacctgtgtaagttgacgcaatgaacaggagtccaagcagaccagaagcaaattgctcgctgccatgtccgaaataaacccagattggcagcccttgactaactcacgacacccagactcgaactcaagtcgccctctacagctctcgcacaagcagtagtcgaccccaccgccaacgactacgtcaacctatgcacaccaacgcaaacctaccgcatccgccaagtccaatcctcaaactctctacacatcctccgcccaagccacggcgagatctcccaagcagacatcaaagtcgttgaagaagaagccggcgaaagcggcgcattgaacctcccagatgaagctgtaacggccgttgcgaagtgttcctcgacactggaactgcacatcccgccgggaggattctcagccatcccgttcctagagaagagtctgcggctgtatgaccggcgcagcgacgatgacggggacatagcgatgggcggttctgctgactccacaagcccgctggggttcaaggagatgcgcactgtcagggagaatgtgtgtcaggatatccctgtgtcaacggcacagtgcgaacagggctggatgcagctttgtgcgtttgtggatggggccgaggaggtggcgtgttggcggccctccgcgcggtctcgattgactgtttggaagcggttagtcgagggcgctgttttgcagggtattgatcttgagaagcagtttctcgttggggacttgtggaagtctgttttggatgatgaggaggaaatggagccgccgttcccacgtggattgctggaagctgttgtgaggcgcatctgcatcgcagatgagcggccgcctttggcggatgatatcaaatgtgagttgaaatagatgatgggatgttgtaggtatcgggatggctaatgattgtgttgttctttaggggcaagctttgataagattgaatgtacgcaatgggttggcgagacatacttggctgctgccgctccgactgtgtcgtctgctattggaagaagtgaattccttcgcgcatggaaggactgtctgcctgagacatggagaagagaggcagccctgtcaaaactgccggtaacttgaccttttcctaaatgagctgcatcgcaatagctgatttggactacagaatggctgctacaacagtcctgaccctacgactatctgcttcgttgaaccctcgcaacggcagccaaccaacaaaaccgcctctgcaccagccacagccgcgaaagctaagaataccagaaattggcatgaactactcaaaggccaccgttgattgcaaaaaaaaaaaccactgacgcacttgctgcgtaaaatgccatggcatctaatctatgatgcgcgcatcacgatcatatctgccgcccaaactcgccccgatctcggacttccaaaaaaggaaatgggaagaatcacgagcaaacgaagaaacaaatctcgaaatgatgctccaatgaatgaataattagcaccaagtgtacttctcattcaaccaccactccacgtccttgcccaatccttccccctcgccggtccagcgtaaactggcgatgctttccttttcgcggtgcacgagctcagccttcgggtccaccaaagccacagccttctgcaagagggaagtagggttccagaattcaaccttgctcatgttccactcgtgcgcctcttgttgtgctcgctggaggatagcagccatagcttggacagtggcctgctcctccgccggagacgtgggctcatcatacagccaccgaagaatatagaggacgttatcctcgggcacctcgccgaagttccgattccaagcgcaatacacgcgggcctggtcatcaccagcgcccttgactacaggtggagagcgtttgggaaacaagttctcagcataaaactcctctcgagcccaatgccacaaatagtggtcaaagttaggcaaaatggcaatcttagcaccactcgtcttctgcgacgccagacgcatctgctcgcacagcttggcaagcacagtctcactgcacaaacatttctgaacatcctcggcaaatagattccttgtaacagccttctccggctgacctgcagtagccggtaaagaaatatgggaagatgagaacggccgccacccaaactgagcgtaaaaattcttcccgatatccgagaaaagcaccgtaaagagcgacttccgccgtggctctttctccatctcccacgtctcgagtttagtgcttagctcttctagcatccgctttgcgtaccccttcccgcggaaagcaggccggcagtagacactccccacgccgtgcgtggaaaccttctctgtctggccgtcgtgtgcgagcagcgctgtcttccggtacgactcgcacgagctgagaattgtgcgctcgtcctcgggctcgttgcgatccactaggatccagcaggttaggccgtcgcgcgtcagccgttgttggaggagatggttctcgcgttctatgtatgtttccacatccagtggccctttccaggcaacgctgttcagcttaattgaggcaatgcgttctgaggctgtggctggagccaggatcagatctggggaatcccctgtggggagggcggggatctctgcggcaatcatgttgaattgagcagagttgaagtatgagttattgaagctaggaatatggtagagaaaggacaacccaagggcaagtgcaaaagaatatataataacgagaaatccggggttaaagtcaaaagttaaagatgttccgaagacaaaaaaaaacaaaacccagaagtttggaagattccccgtggaccgacgggggtccgatgccataatatactggtcatttcgaacttccacaaatagtcacacgaacatagtaggttcttccgatctggatcactacaattggaccacacccaatccatgcctcctctgccccctcaccttgcattccacatcatgatccgggccggatctgcctgccctatgcgtacaaagtaaaaaaaagacgcacaccgtgtttctctttgtcactggcccgaagcaaagcgatggcaagcgatggaggttgcattgcgttagcccttataggcccttgacgtaagagccagtcttttgcctttcgcggagggttttgacgggtcatgtgagccttggcaattatgtcattgtatttatttactcggacgcaacctgtggtgttgaacttcattttatattgcaagtttgagttctatatatcatatgcaatgaagctttgaactatgtatgtggcggaactggacgtcacgcgatcatctttatacatgcggaaaaagatcccgattagtgtctctcctgacagtgatcagatagttagttgcactccaatgcttgctcagtctcaccttgggactgtagctcactccctcttgactttcatcacacaagtcgataatggtttctcgggaatagacaaagcacaagagaatagctccctacagttcgctttcagcagcgtctatttatctaggctggatgactacggaatatggttagcacagttacatacagcatacctaggtagtcacccgaaggcctaccagcctattttcatcggccagatccaggaaattaaacagaaaagcggcaaagatagacggagcaggtgggatgtaaatcaaatgacacgaaccgagaaccgaaatcagataaatatttgcgacacaaaagacaatatggcattatggacgttcgttttgaatggaataattctcacgggttcatcagcataagagcaaacacggaaaataacaaaaaccataacataacgagacgacattgggaactatttcctagtatagttgaattggctagagaagagaatcatgtagttgatttcaacaaaggagacgaatgagatacaacggtaaaatgggagatggtatgggaaaaaaagccggaccgcagcaaaaaaagatcagagagtagaaaaaacccgggtccagcaagatgcaaagtgaagtagacggaaagctataagaaagccagtaggaaatagaaaaggaaggatggagaaggagcgtcatgaatgtgagaatgggaagagcataggaagaagaatgagctcttgggaatgaagtatcaaaaaggaaagatatgaacctggtctatgtaataaatgccatgtgactcccaaaaggcgtccgctcccccgttttatatatttgcgccacttgcggacggcaattccagagtttccttcgtccatcatgtttttttcgatcgttggtcacgctaaatcaagaatgagatagaatttgggcgtggacaaggggataaaaaaagaaaaaggggaaataggggaagagaaaagaatagaaacaaatagacatgaatgccccccaaggcctgaaataggatcggagaatgtcgagtcatggtggctattccgagtccaccggttcgttaaatttctgtcgtgcttcttctacccacaactccaaccgaagctcaccggcttcaacacgtcgtacaggtactgttttggcacggccattcgagaccttggggggcgattgctggggattgccgttccgctgtttagagacggaaaatggcgcagtgcacgatcttaggtgcaccttgcccggttcggccacaatccaagtttgttcttccttggtggtccccgcaggtggtaaagcatcttcccgcacttcaatgcagacagtgaaactgaactcgtcatcgcggggaagcggagtcaaccgggcacaggctgacgcgagtctcgctagacatgcccggaattgtgcctcgaggtcaaccgaggttggtgcgggcccccggtctgagacaggggcacccgaattagatggatcttcggttcggtcttcaaatgtagtattcacctctcccggaggcgcacgcgggaagcccgacagatcaaaggcgtatcgttcgaggggctgacttgtgcgaagagatgaaataatgatactgactgcggtgattgtgcccttgagaatctccgtcccgactgcgattgaagcatcgttgatgtagtcacagacttttgggtgacgggattgtcggacgggatagttgtatgcccgcacggggaggaatgttgcgcgcggatagacggagcgcagaaataggatttgatggacggagacggtgaggaaattggtgaaggaggccgctaacgctgattggtttgtgggcagcgacttggtagcagggaccggagcggagaaagtggtcatggtggtggtggtactactgctctcactggcaatcggcattgccgtcgaacgcgcggtgagggtggtcttgacgaggtcttgatgaatctgaatgatgttccaccctaaagctaatcatcgctctacctttctaagccatcggtcaatgtcaggttcaataacttccaggtggtgtttatgttttggaatcggtcaaagttttttgagttccccgatactccggccagcacgggtcaaccgtcacgatgatccgcaggataaaatggctgatgagatcagggggaatagagcgacagaattgcagtcacccggggtggcatggaataaggtctatggggggaaagaaagatggttgggtatatagtgcgttggagggggttgtttgtgttgcaaaggaaatccgaaacgtacgcttaggtgaacaaaacaacaagtagacacaagcctcaaagcatgagggatagaaaaacaatataagtcccaagcgacgatcccaagtggaagagcttgatcactctttttttagatttaagaacccttggggaggggaattcggagaggggttttaagaagcgaaaggaggggaagttttgagagacggtaaccctcgagggaatatttaagggaaaaagaaaaaggaaggctggacctaagtaggaaaataatgaggaaataagaagttatagggatgaatcgatgggatgtagctctctcttgctcatcgaggggaaaagcagaagaaaggcggacaaggcgaagtcggaagggtcacggttgatgtcacgtggattcgtcatgggtttacagaattccatttcaaccacgatttacttcgctttttgctctatattgtttggttttgtatattaaaatctttctcgttttttggtgctttttttgatatagctaacattttatatagcaagttagcatggcagatatgtgctaaaattgacgtggaaaaagtagacacagaaacagagaaagaaaaatacagtagcatagtgtgcagtgtacagtgttcagtatacaattttcagcatttatgcctatatttgtacaatattccacggagaaaacaagagcatacaagatacagtttttttttttgcctctctttttcttccccactgtccactgtgaggtggataggtactctataagaggggcgatcgtcggcgaaagaagggcaccaagagagactatggaaatactagtgtacggagcacctaaatatataaaaaccgtttaccatgcaatcagactgaagaatcaacggagcataattcaaatgcttggttccggtaccttacctatctatggaagattacaggggattttatataaacctatattacctataacatagaatatgactacgttcgagtataggttacatgttcacacttcttacatagtctactttgtacatcatacatcgatgtactttgtacatgctattagggaactaccgggggtatcagtgaggtaccgggtacattgcactgcgtcatacgcctacccactgtctccagtcgcccgatgatcttcttacactgacggcagtggcggtcataagaccaggcactttcccggggaaaatgtcatttttgctttgtcatttgtgtgttcttgaaaagccatgcagaggtatccttcctgtacgagactatcaatatcttccatctgtttctacaatttccgtgtacctctagcctttatggagcttttcaagaggggtatatgtacataagtacggtatactagactctctagggctacactatatgacaggtactacaggcatacccacccagtcgcccttcattctatctagtctgaattctacggagtattccccgacccgtgtaaccgtgtgactttcaaatcatagtttctccaaaatgacaccgagtcagtttagtggaaccccatgttctccgaacgaccatgacccaatagaatcgactaaaaagatcagaacttgcaccttaacgaagctggagccggttcagcccggaccagtgacccagctgcgtatggcacaggtcctgaaatggtaatcggtaaaccactacggagtatcgaccctcaatggtccatgtccacttgatgtttgatcgaccccggaggaggtctgatctctggaggttcctggcatcagaccattccgggggaccgtgtgacctatttggagacgctattggagagtatatggagcctgtagtctaaattaaacgttgaaaccccgaagttctctcactgtccaacgtgccctataatgtccgtttagccctctgctagcaaggtagtaagggacaaaaatagctagaatgaagctttggagactgccccttgccaataaatccctgtcttcccacgctcaatttcatttaaccttggtgcttgacatagttatttttctggctgccagtgcacactggaatgatatcccgcttcccattcggccatagctaatttcggaggttaggcatttgcttgggtttatttttagtcggtaatgaaggtgtccactgtgaattagcccacctatgtacctatgtagttatgttgtaggcacataattaataatgcaaccgagaatcggagagaactacggagtaagaaatgaacagttgtgtctattgagctataccgaagttgggcttatccccatatcttagacacgcttgatgtactcctacagcttgatctcttaggacttgaaacttgaagtagtcttatattatgtaggctggtgtgtatggatgtagaaacatgatgatctacaaaagagtgatcggccgggtatgcggcctctgcccttgacaaagcaagtctttaataatatcctgatgtattggctcaggatgataatgatcagcaatagtgccaccaacaatgggatcaatagtacggagtagatcactctactatgtacactatacgaaggcagtaaaatgtactgtatagccagggactcaaggacacgggtatagtcatgtaaagaatggtacccgtagatgtctttaataataatccaattggcaggagcttcaataacacacagcaaataaagaagaagtggaatattaaaatcggggcgatatagagccgaccgccttcaaattgcccctcctccgcgtctatttatctgccgacgcaaaacattggattctcaatattgcgtgactgatactcattggcttcgaggccttcattcatctctcttctgaatcttgcttgactgacccgcgaacccaaatagcctcattaattatacttcgttcgccatggagcaagaactcctgtcgctcctggcagacacccagtcacccaaggccgataccaggagagcggcagagtcacagctggaaagcctttatgtccatgattccttcgcaatctcactcacagcaatcgcttcgcatgagtcagttccggtcaacctgcgccagtctgccctctcagtattacgtaccttcattgccgccgcttggtctccaattctcgatgaattcaaaggacaaatcctcatcaacgatgcgaacaaatccagcgttcgccaggcactattggtcctcgcgacaaatgataaccctcagcgcaaggtgaaaaactccgcaagtttcgctgtcagcaagatcgccagtgccgacttcccggacgactggcccgagctgctcccttcactgctcagtatcatcaataactccgccagtaccgatggccagatgcatggtgcattgaaggttctcttagatcttgtcgatacagggttcagtgaggagcagtttttcaacgtcgcccgtgatctcgtttcgtccctttttgctgtagctaccgctgagtccaggcggccaatgctgcgcgctctggctgttgcagtcttccgctcctgcttcgatacattggaaatggtgctggaacaacacaagacggccattaagcaattcatggatgaggtgctcagtggatggtcgccgttcttcgacacggctttgaaggcacccctaccgcagccacccaacgaggaagaggagcataaacaaggggagattgcatcgcagtggaggggaattgttgggttaaagttgcaagtcgtcaaggtatgcggtgcttcttcttggttttgccgggctttcgctgacatggttttttttttttcatagactcttatgaaaatccgcatggtgttccctgctcttttgactgcacaaagccccattttcttctcaacagtctggacagaactcaccaacgcgttgccgatctaccagaatttctacattgaggataacagacagagtcgtttggaggatgcggacggacttccccactcactcgatttcctcgttttggaggagcttgatataatccaggcccttttgaaggcacccccagtaaaggcagagctgcagcagcaacttcaaaatgccggtgcgactgccagcacgtccagctggcttccggagattatgaagctcgccagttcctatgcacagattacaacagaggaggaggctctatgggagattgatgtcaaccttttcctttcggaggagacttctgtcacggccaactacacccctcgaacttgcagcggagatctagcgattaaggctggtgaatggctgaagggtacagctgccgagggtctcctgggctacatgaacaccgtctttgctgattcgtctgtctcgtgagtatcactctgtatatctgctgtgaattatattgaccatgatgcaaatagatggaaatcacgggaagcttccctgtatattctcaactgtctgcttcgagacttcggtgaagtcgatcaagagatctcacctgagctggcatctcacttcactcaattcgtgcaatatgcgacccaacaagaacaggagctcttgcgcgctcggggctaccttgtggctggcgctttgtccaaggtcgccggcaaggcattccaacagaccacatcatcctatttggaggctactttgaaggcgatcgccgaagaccccgccgaagtggtccaagtggcctgcatccgggtgttacaagatctgatgcccgctctgccgaagggcttggcccgccccttccagcctgctgtgattgcggccatttcagaattcatatctgcacacgaccttcgtgaacagactgactccgatgatcttaaggttacgttggcggaaactctccgggacactattatggccgattctagtgtggttctatcatctcctgccatcgacgtgttgttcaacattgctagtagcggagccgaaaacttccaattgaccttgaccgtcacagaggcatttgaagatattgtggaccaaattaccgatagtggccccgattcttacatgcgtctttgcgagaaggtgcttccctcgttgatgggcgcgattgatgtgggcaatctgactgaagagaatgctttgacaaacttcgcagccgatcttcttcgcgctctagccgagcggagtcctgagcccatgcccgctggtttcgtggagacggtgatgcccaagttgaatcgcctgctgctgaactctgatgaagccgaattaatccggcccgccacagaggccgtacggcacatgctctctcacgactttgcgcagttcattgcctggcgtgatcctcaatctggaaaggaagcacttgaagttgttttggtcatcattgaccgcctgctgggcccagccgtggatgacaatgcagccacagaggtcggccagctagcagcagaattggttgaaagggccggctccgagcgcctcggtccttaccttccgcagctcctacaggccgtggcacagcgattggcgacagcacagcaagcgcaattcatccaaagtctcattctcgtcttcgcgcgactcactctcatcagcgcacacgaggtagtcgacttcctggcccaggtcaacctaggcggccagagcggactcaccgtggtgctgagcaagtggcttgagaactccgtcaacttcgccggctatgacgagattaaacagaacatcttcgccctggcacgtctatacgagcttgccgacccacgtgtggccgaagtacccgtcaaaggcgacctcatcatccaggataccggccgaatcaagacccgctcgcaggcccgcaaaaacccagaccaattcacaacagtgcccgcaccactgaagattatcaaagttctggtcgaagaactgggtgcagcatccggaaataaggaaatcgatgctgccgctgcggccctggatgacgccgacagcgacgacgatgacgacgactgggaggatctccccagccaggtccttgacctcggcattggagccacgaaacaggggctgctgaatttcggcgagggcggctccgagagtgtttttggtgtgcgtcgccgagacgatgaaacgcagggcttcctggtggatttcttccgacaggcctccacgcagcctggtttccaagaattatatgcagcgctgactccggatgagcaagctaagctgcagagtctgtgagtgcagctggctgtggttgcgagtccccttccccgagccccgggttattaatggtttgatgcatggatgcccataaaacatacaaggacttgtatctgtcgcttgtacagagtaaacataccttttttatttattttagttgcttgctacttgctccgtactgtagaatgagcattagcagatccttgtggtatggatcctggtagtttccggtctaggccgaactggagcgatccacaaatgccagttctttgtttgcacccctgtactccggactccgtagtccgtacaccgtatgcccatctgcaacattgtgttttgttgattaacttcaggctagaggcctagccatttgaagtctatgacaagagataatgataggtaatttggagtggtataatttcatagttatatggctagttaggctccttctataacccgaagcaaaaagtacataagtatagaaaattgaagcgacgagtcagaacatccctgtctctgcatatgccattccttccagtcggaaccactcagggattatccgtcccgtgtggggatgtaccagacagccgggtccaagaggtccaagatcaggggtgatccttgctttgagtttggcctttcctttttgcctttttctttttgcttcttctggcgaatattcctttcatctgtcccagggttcccagctgagttgggcactcatactcttacaacacctctcggcttcctcttctgagttagtgcttaccttttaccgcttcgttgtcaaacggagcacgccattacctgtagggatccacctgggcagcagggtctcggagttaaatttagccatactactccgtactccgtaagtagctacaacatacaaagaaaggaagggaaaccaaaaatagatgatgaatatccaacatctccggataaatcatttcatatccatcatcaaaattgcaacaatcaaggatctcttcaaagaatctactgttataaggcgataaagagagggtttcaagatttcgatatcgaattcccgggatactctatacattcacatatataacgcccaatccactgggattgttttctgttaataattgaagagaaatgaacttcactaactactatgggaatagtcggctgcttatgcggccttctcaagtcttcttaggtagtatttttaaatgtcgtttttgcccttctcgattttacagctagatggctgagaaaggtcgaaaaaattgtctgtttctatgtacaacccactttgtctcacaatgttttcaatgagaattgactttacgctactgctcgcggtgactggctcttctgactaccaatctggccaaactcagcagcggtcctcggcctgaattagtttacgggtttattactccgatctagctttcactctacgaaggctccattgctctttccttcaagctgaggttaagaaggcgaagacgataccccaaaaaagacatgcccaggtcgcataagcgatcgactactcttcctcgcctttatagtttcccggatttaggaatgcatatcaccgcccaattcttgaatgctcaacctatcaagccataatgagactcactactagtagccaaaacaaagtagattcatacctgaataaatacgtatcattagcaagtgtcgggaaaatgttgaacattgattttcttctagagcatggtccattcatgctatggacagactagatttgcaatactaattaaagatcactttcatgccatgggtttagctagaatagaagtgacttacatccaatctatccctaaaaagcttcgatgtcttgcttatgtcttcgcaaactagactgacgtcgtttctgaatgcttgatcaaaaccgaccggcagttgtcatgaaataaaagtgccttaaataacgggcttattgctgacgattctataccaagggccgagattttcggtgttactgtcgctttcaatattgaaagctaattcaagagcctagtcaaacttggttacagcaatatctgacaactggatcctgtttggagcccgatgcactaatctagtctggtgagaacactcaatgtagaacttagatttgcatactcggtatcttgctgtccagggagaacgatggctaattttacattcccaagataggcagtgatgggtaccttccgtggggctatacatgatgtggctaatatatccggaggcctgtgatttgaggatcgggagcaaagatatgatcagtactagtcagaactgaggtgttcgatcgatcgggacagatgatgatcctaggaacgatacctgatctctgcaggggacctttctccgctttcacacatctggcagaacctgatttccctccctgtagcgatcatcttgtcaacatatgacgtctcacgcagggcataaactttttggtactaagtaagaatgccacattgagaactcaatgcctggaaactcttggtcatggcctgttatcacatattagagaattgtctagctgatcacagtactagtatgttgggttatcgtgggccgctatgagactgtcttggaaggaagacccagcacagtgggccagcagtaccctaatcctagttaaccagggttgagatcccgagaattgtaaccctggaagttggaaccttggaaatgttaaaaaatcgaaaatcgaaaatctaaatttcgggtcagaccgatttggaatgggcgactttcccgtaccaggctgtcggatttcccacctgcggggtcaacaaaagcaaaggtacggaaccggccaggtggtagaaaaaaacacagtggctacgctagggttctccccggtatcctctctctcgggttccttttcttggttagaattgatagcttcatttcacttcccccccctcctccactttctctcttcatagcgaaaaaaaataacttccctctctctttcctacctttcctcctcctaatccctctccctcctcctttctgtctcgccatgtcacaacccaatctcaacgaacgcatccaagtcgacgtaagtagatcattccctctcatttgttcaatctcattcctaccccatatccctataccttccagaaccccaaaaaaggtcacccttgggcccctttactaagctcacaaccccgattcccaaacttcctacaatctccaataacacccccaaccgccactaacaaccccccagacaagcgatgatgactctctcttcgacatcgaatccctctcaggctcaaacctttcattggcatcctccgtccgagactacagctacgaaaatggccgccgctaccacgcctaccgcaacggccaataccccttcccaaacgacgaagaagaacaagaccgcctagcattaacgcaccacctcttcaaactgctcacaggcggcaatctgcaccgcgcaccaatacaagactccgacccgcgccgcattctagacatcggcactgggcccggcgaatgggccctggaaatggccgaagactacccgcgggcggacatcatcggcaccgatctcagccccatccagccgaactgggtgccgcccaattgccgcttctatatcgacgacgcggagagtgattggactttctcgcccggtgaggcgttcgactatatccatgcaagaactatggcgggcgggattgaggattggccgaggctgctcaagcaggcttaccagcatcttaagccgggcggctggtttgaagcgcaggagttcgagcattgtgtgcgctccgatgatgggacccatgagcgcgctattgctattaatagctgggcggaattgttgacccaggctagtaagaagtttgggaagccgatggatgttgcatcgagcatttcggagtggatgactgaggaggggtttgcaaatgttactgatgatatttataaggtatggtcccctttttttcccccgggtgttgtttcgcatactgacttgctttcagagtcctgtcggtggctgggccaagaatcgccgctacaaagagatcggtcgcatcggcaaggtgtctattatggagaccattgagccgtactcactggctctctttacccgtgtcctgggtctctcgtaccaggatgcacaggagcatatggaaaaggcgcgcgcggagttgatgagcggttcgcaccacctctatgtgcgcttccactttgtctacggccagcggcctttcgacgatgaacccactcatcccgaggctccctgaggcttggggctgtggcaacaatgattatcaatgagacactacgacctaaaattaggattgagaatacttctatccctatcgacctctcgatctctggcaacatgcttgatgactatatttctgcccactaatgtacgaaggttctatgtactatattgtttgttccacttatgttcatattcatgtggacatggatatcgtgaagcatccgggagttgatgtggtgcggtgattatgtcccagacggtcccaccatgacttcacttgcccggtatcggccagcgacccgggctatatgaccgacatatccaagtgggggtttcaaatactcagctccgaacttgacccgggccacttgatttcaaggcattcggaatatgcacacacaactgacctaggcctgcgaccgggctcgggttgagggtgcgcttacgccgccgcaagccgcccagtcccgatcccgagaacctgacacacacccgagacagcttcctccggtgaagggcttgtccgcaagacctgaatcacctgaggtaaacgttgctcgtcacagctgccaattgtttccagcaggatctctagcagttcctgtttcccctcgcccttccatgagcttggcatcgagttcatgatggttgttggtgaaggacggtcctgggaatcagggccggcatggcttaaggtatcgtctgccaagtgtgtcggtgcgggtggggagaagggcgcagctgcataggtgttgatgtttgtgttggcagtgatgttggtgaaggggatagtagaataatgagacggggtttggtatatatgcgtttgcgggaattggttcggactcggattcggattcccgtatgcatcttgcccccaatgatgaaacgcatgaggcctgtcatattcatttcgtattgagtattcttccccgtaatgtggtactgttgatgtgagtatgggtgcgggatatccagtgtgttgtaagtatggtagtgcttctccgtcaagcatgtaattatcgctattgactccatatatcgacgggtagtgcatccctaacattgcatcctgcgcgtgtaacgcgtgcactgggagaccctgcatcggtactgagacggttccggtcatggcccccggagggtaggtcacgcctcctgtataacaatcgaacattgtcgtatcttctacagtatctgcctagagttagcataggcgccaaaaagaagtgaaacaagcaaaacatacttctacaagcaaggggttgaactgtaggcccatctagctccgcaatttgcggcggataccccgtcgcgataggataagccgaagtagaagtcgaccgcgacgaagcggatgtcgaccgagtcccattctcactccccgtactatcaggactcgtcacagtcatggagttcgtgatgatcgatgacgctggcgatgacccgcgccagctaccttcaccagtatccggggtacctccagccgaagcagaaccagcgccattgccatggccatggccatgaccatggttgtcgtagttgtgcgcaggcgcatgaggcccagccccttggcccgggcgctcgtgctggctctgggtatcacccggctctcgtgaaccccggttcaggcgctcccgcagctgtgaaacttcgcgtcgtagttggtttattatctcagattggctgatatgggcccgatcttcagccgttgttaggtaggtacattctgcttcgagaccgcggattatgcaggcgtggcatgggacggagcggtcgcactggtgataagagaaagtggttagtggcttgggaattaattaagaatccatgggtgtgagtagagataggaacagaggatccgggtaccttcactttgcgctcgcgacatctgaggcatgactgctgcgggcgtatctttgtcttggagtcgggcattgcggcaatgccactctacggtattgcaactccgtgcggtgaagatcaatccctcagagattcggagaatttgttgaagttgggttccactcaaagggtcccagttctccatgcagggtcagtcagctgttgccccgtattccagggaaatgtgatggatcgtatttcagatccatatttttctctctatgttttcctctgcactctgattgggtgcagttcgcaatcgcaattttcttctgaaggtaatcaagagatcggtaccttcgaggagctcttttgttgtatgcagagctatgctacttcatctgcaatgatcgaagtcgatatatgctactttattgaatatgttctatgttgatgttaccgtcgcaacgcttatcacgtcccccgcgattgccgtagatcgcagttcatggaaatacgacgtcggtgtggggaatccttgaaagggacctcgggacctcgggggctagtgagttagtgaaggaagtgaggcaatgagacagtgagctagtgagctactgagctactgaaggaagtggaccacgtgcgcgaagggagtatagggagtatgtgctacataccatcaaaccatagtcattacatcctttcccgtttcgcctatacttccctattgcgaagataacatgaagcccttcccgcccataagctggctaacccggagcatggcctcctgctgttcccactgctaccagtgcaagcctcgatagagaacccagtcttcgcccgagcacccagatggggtccaacaattgggtgtttcgagtgcaatctgaatgagacgcttgtcagcgaaacagcacaagcaatactgagccgcggcctcctccgataaaaagtatcatcattcatacattccgctctgtacattctgccctatacacaagataaccaaatccatcgttaaatacatacaaacaacaatttcaaactttcgaaagaaaccttgaaatgtctacccctgcaaagaaaatccaaccccctccccagtccccatctcaacaagattagccctcatcttctcaggcctctccccaagtccaaaagcagcatcatcacgacgaacccaagccccaaccccatgctgcagtaccgcagtagccctaaccttcttcttctcctcggcatcatcacccccatcctcactgtcagaagccttcaatccaagacttccatgcaaagtcagcctggtctcaaccccaccctcactctttccccgataaattccacgatgcaagatattactattataaaacactgcatctccaggctgcaattgaacaaccaattgatccggcaactcagccgcataaggatccgcatcacgctcgacctgcgtgcgtgcgcgtgcatgcgtccccggcacaacaatcagcgatgcatcggggcacagcgccaagttgtactggcaatgcgactgacggccgccaggcgccttagccgcaagctgggcaagttcttcctcggcggtggcgtgttcggagatatcgtcgcggtgccagcggagctcgaagtctttagtttcgggcgccacgagcagattgaacagttccatgacgaggggctcggtctcgctgctggcggcgttttcaacccccatgagctcctccgcgacggcgagaatcgtgggagagaaatagcatcgtgcgaagctgtcccgtcctggcatttcggggtgcattaggtgctgcacgccccagattccgccctccgaggcgggcggtacggttgtcggccagggtgggaattgttttgggacggtgcggaagtgcggccagcctccactgcgagtcatggttgtggcttttgtggcaatttcgtggtagtgcgctacctcggctggagtcaggagattgcggactaccacgaagccatcgcgtttgagggcgtctagatttggggtggacatggtaggaacgttgaaagaggaatgatttctggaattcgcaaaatatctggagatcttgaaatcaatatatatctgcgggggtggatatacacaatacgacgcaacagtgtcgcatctacttttctggggactcgatgctaccgtggatctccagatgtgacctttcccaaggttatcgttatcgatgtatatgtttttatctgctgtgtgtacatatgtagtatttgattctaataaataaacaaacaacttaacagcataacaacacaacaccataacaaactcatacattgtcttgttcctagacgtcatggggatcaacgccatggggatcaacgccaagaatagccaagagccagagggctgagtcctcccacagtgtgatgtcgcatttgatctttttctcttggattcctttgttcatacctctctagcttctgcttttttgcgatattccatattatctccttgaattccaagaaaaattcaaccttggtgcaaatttcacccccgccatgcccctccttcacgtgggctccgccctgctagtattgctcctgatactcccgcaagtacatgccttcggagctggaaatatcgcctctatctctgctgtagaaggcaagaactggcgccatggtgatatcgaagatgtcctcaagacgctggctttcatctccggtcacaaatggacctcgaccatgatcaagcgcgtgtattttggtaactggttgcgcgattagtgagttatcaaagaatccagtaaagatccaatatattcctaactgcttctgtagctcgcaggcaatggacgttggaactcttaaaaacctgcaagccgatacaatccgtgttttggtgtgggtcctctcgttcctgagcttcggttatgccacggctgaatttgaggtgactgcggagcgattgggtgtttaccgtcccgaggaacacatcgagtaagtccagcttgaggtatattgttggtgatttgtactgattgtcttcttctgcatagtaaccccaaggactatgccgataacgaagacgcacgtcaatatgacaagcggttgcgcccacccgttcgtgctattgagctcgaaatcgacccgaacaccggtatgaagaactacatcgccaatgagcgaggcgactgggccaccagcgcggcctttatcaagttcagtcttagccgcagtatccactatggacggacatacaccaatggcggacataagaagggcaacgaggaggacctgtgcgaagcactccggtgtctaggtcagggactgcacacgttggaggatttcgctgcacacaccaactacgttgagctggccttgcgcgagatgggtttcaacaacgtgtttccccatacgggtactgccactcagatcaaccttcaagggcatcacgttttcccgcttgtgacgggaacctttggtatggtcgatttcttccattccgtgatgggagaagcaaatgatcattttactcaatctgaggtcaacgagatggatattgcgctcggtgatgccgcagcaaatgcgcagtcgaacaattccctcaatgctttgactgggctcttgggcaaaatccccggtaccaaggatcttgtcagtgaggcagagagtctcaagaggtcgtcagaagcacaagaaatggccaaccggagccgtagtgctacaaccggctatgcacagtcttccaatagtcacgagcgatcccgtgcgggcccaacgggcgatagttcgaagcctagttctgggctcaacgccatgcctgatttcaacccccaggagacagtagccaagatctatcccattctggcattccgagataaggtgatgcggagcttgaacgcaatcattgaaaagatcccaggcttggagtcactcgttgagaagatctccgagactctgaccgttgtcgtcatgtcgctcctagcgcctttcattcgacctttgatcaaagctgcttccaattccattcaaacaggatcagcaggcgtcattgatgcctctggcaagcaccagtacgaaccttggaccgatcctcactgcaccgaccccacccactccttgctctccaaggaccactttgccaacattctgaacgagcccgccggacgagtcgcctcttcaatcgtggagtacgtcgcgcctcgcgttctgtatgcttggcaacacaccgatgtccccgagagtgaagtcctcaatgattgcatgcaagtcttccaccacccagcgttgcgcaacatgcacattgatgcccatcgtgtaatgttcgagaccgtcgagaaatgggttcacagccgctcagaccgcggcgcttcccttaactccgtcctcagctccgagggcgtgagatccggccgtaatactggtggagtcagccacactcacagcgatggtcatagcgcatttgcggcattgggtggtgcctcgcacggccaaagccagagtcacaaccagagcagtaacaatggcggaaattcatctggtggattctcctcattcttcccccaacaaaaccagcaacaatcaaacagcagctcctccggcatgccctgggacaaactctccagcatccccggcttgtctggcctgagcaaattcgaaagtaaaatctccaacttcctccctggcggcttgtcacgcgatgcaaacgaccaaggaacccaacagagccaaaactcataccagggctaccaggtaggtggtgggcacgaagccatgcaaccttctccacagcagtacgaaaactaccaccagcctcagcatgtacctcaacatagtcaaggctaccagcataatcaacatcaggaacagcattatggtggctcgcagaatcatccgtcctatgtacagcaggatggccacttgggccacccgcagtcgcacgattctcacaatgccccgccatatggttcgcatccgggttcgcatccgggtccacatggtgggtttgggcagggccagggacatggacatggacatggtcatggtcatggtcatccgggttactgaggattagatgataagacgaagataaatgattgcgtgaatatgtcgagatcaagtgcagatgaattgaaatgattgtgattgtatttcatcgggtggttgtttgtgccgatttatgaggtagtggagtttggaaacacgataaaggtgaaggatttagggaacttggaagttgtactttcttttataaagcatatgaaacggacattgagtcacctgggctttctttggatttacatgagctgttgtgattccgcgcggtatcgcttagtcttaggagtccaacacgtgcggtttacctacgtatgggttcatatcaatagctcaatagctctgtttacttggtttcttgcctctatttcataaagccttggcttgtttcaatgaaatatacaggatgcagatgaccacaaatactttcaaaggctcagctgtgagttgtactgtaagttattgttcttataggaggtgagcaaagggggctgttggttcctaaagtatgcatttgatatggaaatagatgctgttagcaacgtaagattgatacaagatagactcccttatgattcgcagtgtttgagtattacaagtcccttttcggctctctggtatatttatattggctgtcttgtgaattttggctcttctatagctatatcccttgtcagatgcgtttgtcactttctctacttggctaggtattcatcattcagaaaaggtctttacatttgccgcaaggctttgttaggtattctgggccttgtccaacaaagggcagagccaactaaccctttaacaataacaatgagaatagcattcattatacgacttaacataaagaaacctttcaattcctttgacttattcttatctctcgggtctacacctggactctccggggctatataagcccttctctcctcgcgtcaacaaccggaatttgccaacattgtcctattctacacttccgaggtcggatattcaatccaataccaaataaaacccaactgtgtgagtcttgcagcccatatattatcatggcatctgacgagctttccgagcttcttcacaggtgggaacgggttgcagtactctgcgacgcaccccaggcatctgtgcagtgctatattggccgagaacacagcacttcctggataatgactgtagttaacgagtggatcaacgagaaccaccttatctggaccctatgcgccgccctcgccgattccggcctcgaccaagagtggacacgcagatttgacctctattaccgcagggagtggcgtcggatccagttgatggtgcaggtgacccagggtgctgagcggttgctgctagatattcgacccccgcctatgctgctcgctgtgtttgcccaccacaatgggtctacggcccgataccacgccatcatgtccacgcctgctcgtactcgagccgacggaggccttctgaatctgttgcggcatgtatatcatggaggcatttcctcaactgatgtcttcgatgtagtcctctgtggagagggtatgactggaatcgcgccggagtcgcctccgtactctgctctcgggttgccagaccattccatcccagttttgaacctccctcctccatatgagaacactcccgggtctgactggtcagagctcttttctgagcgctatcccactccgcctcctccctaccgcggtacttctcccgctccccctggttggactccaccatcctaatgatggcgtgtagcaggtgccttgcttgttggagggttggagcattatctgagcttatcatgagataggtagcttactctacatagaacgttttcttagttctgtctcttttatcagaatgaatacgagtggttttttttttgccaattctctatgtatacgtatagtatagtaagccatagctatgatagcgagattgaatacctttttgagcagtttatatgagaattctcaaagtttagaacattatatatctctatgcataagaaagtgcacgaactaattttgagttcaagctgtacttataggaacaaatatagggcaagaagacgaatgtcacaaactttatctgagagtatattgctttaatatccaaaaataatccaaggctatgtaggctggtcgcctatgccaaaaatagcgggatccaataatcgtgtgtagatcaagcggtgatagtatctccaacaagcaatgatcgagggtcagtggaaggcctaagtttgtcgagtgcatcaacccttgcagtgtaagactttgtttcaacggcaatggcttatcattcgataatctggggatctaaatacgtttgtccagctgattacaataactacaatgtaagtctacgtcaacattcagtcatgctcctattcttatgtgtcagtttctcgtgttcgtgtctcagttgaactttccaacatgtatatgtacagggaagaagtataagagagtcgtcaacaccatcaggatacgcttcaacagcaaacattagtccgacaaaattaaaatgaagaacatgtcaatttgcgctctcatcttggcgactgccacctccatcctcgctgcacccagcgctgtggtgcccgtcctagagccactgcaacttacaaatctcaacgcagccatctacagcacaagccccccgcaaacctgcttcctctcttttgctgtcaaagacccaaacacgaatacagacaccaactgctccgcttactggtatgttccagtctatatcccaactttcttctctatctttaggatgccctacaagatcaaagcaaaaaggaaatgaaggatactgacttttagataggtccattggaatggctggaaataagacctacgactgctccgacaaggcataccagctccacctcccaaatggaatctatgatattgaaaacatcgatttcggagtctcccgcgcagacggctctgagactgggcggtcagttgtgactggcgacctgtggaaatgcgagaagcaggagtatcctaaggcacagtgcaagtgggatggtattttcagtctcgatgtgacttcgtctgcttgagtgagggtttgcgcgtatgtgaggagagaaggcagtattgctactagggctatatatgtggagatgctattttgcttccttgtttcagtctatttggtctaattggcatttatctcttgcgttgttgcttctaaatatactttaatctgttcttatttccgatctgagacactctgtagtgtagctggcataaatctaggaacagcctcgaaataccccgggctattcatgagaggaaaacaccaggtgaactaattaaaagtcctatatcctatatcgagaaattgaacactcagacttttatatcgttggaggtcaagtccaggccaatctggaaaaaccctgctgactcatcttacccacttcgggtgcccatgaggtcagacgcgtgaggtctcggcgctacaccaaaaaatgtggtcttgaattccgtcgatctttgcaatcaagcggattcttctgctcatagtctcgataggcttatccctgatgaaaaagcttgatgattcagcagcgattgccccctcataatgaccgataaggctcctcgacacctataaggagtagtattacgatattactttatggacgacgctacttgcccacggggcgcaaaagggcggagcgcttgcgatctatgtcgccaccgaaaggtaatatccacaatgcctgtgtgcgtccttaatctgattttgccgacagatccgctgtgatagaaatcaaccagcctgtgagaattgccatcttgcaggactaccatgtacattctctcggcctccatcccagcatcggaaaagtacccgacagtaagactctatatcattgaacccttctttaccaggcgcttacggtacgcagagagcttgccgataccaaagctcgggttcgggaattagaggccttgctcggacttaaaggatccacaaaacaaagccacaaagcgctagctatcccttctccgagcagaagctcttctccagcttcgcctagatccctctcggaagcatctttatcttatttgcccgatactcgtgattttgataccgcgttggcagctttccagtggcacatctcgtattgtgggcttgggggtgctctttcgacgcaaagggcagctttttcctctcttgttcaagagcagacaggctgtactttcaatgtggatgttttttctcatgaggtcactcagtctttcaattcacaacagctcaagtcgacaaagaaagtgattgggatcaaatggccagattctgctctagtccaacggtgtttggaatattttgatagaaatggtctctattctatatttccagttatcgatgttgaggccgtacaggttctactcaatgcaagggtcttagaccggcctccaaacatgactcgggcttcgaatcgggcttgtctagctgcttttgcggcaatgatcacccagatccaccgccatgagcgggcttttgcaggcactgacccggatgcttatttgcaagcagcgttaactctccttcctgaaatgctactggagccccctgatctacggaccttggaagcggtgacaatactagtaggttcctcgcatgtccagccccgagagtggatcccatgtcccagaagcttatatgtggccatagatgctctatatcgcccctcttggcagacctcaggcagcagagctacttcttgggattgcagtgcagcttatctataaccttggggcaaacagaatacaaacccccaatgaggtacacaggacagaccagcgtagccaacatcttcgagctctattctggcattgctatgctgtcgacaaagaattctctatccgaaaatcccaaccacccttgataaacgatgccgattgcgatctagatctgcccacgacatacgcccaggaaacctcagaacgtcacttctacatgaagcccttgtcatccaaggagcttcttttcccctcggacctccgcttttctgtgctcaagtccaagatcttccggttactttattcggtgcacagtcaaacactaccggaagctagacgcattcagcatatccgcgaactagaccaagaactgaacgacttgaacctgggttatcctgccggctgccggccggaggtgttcgccaccgagagcgcaccggactatctgtttcatgatctcactctccgcggtgtgaatatccatttggaatattactactgcctcggaaaaatccacggagcgagtagctcttgcaaggtaccttcgcagagctggtcgcctctcccatctagtgcagagctgtgctttgaagctgcaaggtgctcgctgatctacatttggcgagtccgccaattggtcaaccagcatacgttctggtaagggacttcgaaccttgtcacaggtatagatactaatccaggtctctttcgtattctaggcttcacgcgcaatttctcctcacggccgttttctcggtcttctggtatctcatcacggccccaaattcatctactttcacaagggatctcaagaccctggaggatatcgctgagctcttagctcacctcgacagatcgaccgatgacgggcagacttacccgccgttctatttggcacaggcttttgttgagaggctggtctcgcttgcacggcagtcgcggcctagggttgagggcacatgatagggttgctcaatactttcggttacttttctcttgaaggtagtagctttgtatatatacgaataaatgctattacactctgtggctttgggtttgataaacaaataaatgaagttccggcaacatgaggatttcccattcttcaaaatcttgattacaggcatctacatagcgtgctaagacctcgagctgagaatttgctcatctgagacacctcgacttccgaggttgagtcggaggttgacattcaggaaagtggagacctcgggcatattacttagcgttatctgtcaggcggtgagcctccggagtattgtaaattacctcattggcccgtcccggtactagcgcatacacggcggtatctctcgcatccgacggtgcttacgttgacagttggactaacctcaacgggaataacggcgatgcagatgaacttaaaatcttcaccgtaccccagtactccggagtgaaaagaaaagtgaaaaaaaagtcaaagcaactctctctctctcgcacaatcttctatgccactttgacgatgtaggtatctctacagtcttcatctctcctccgtccgatttataatccaaatgaagcggaaaagatcctacgataccagccaccgccactggagggctcaccgcatgacacctcaccgctgccacataatccacttgaactcgagagcctagttacccagcgcaatggttacttaccgataagcggatcagctgaaggatctgttcacacctccttatggagtacgaagtactccatccctattcccccattgcttcttgatgtggaaattatgtgggtcgacacgaccctcagcttcaacttccagccgcaaacatggatatcaggtgatcgtcgggcatgagtctcggtgagtttggttcgttaccaggcgaaccagtttcggacctatccccagaaggattaacgatggggccaaaatctgatgtagtggatcgcggtgctacgccagccactgcaccgggcaaccgggcaaccgctagatgggagcttgtgggcctcgcgccttttttctgcagagctcacacgagggttgcttcagacgatcctgtggtgatcaagtacgaagtaattgttcgaaatccaatgtgcgcttgacatccgtctgcgatacagaactattctgtatatcccgaaagagaaggaagtccttgaatcgaacacaatgactcgtgctgtaggtctcaaagctctcgaagacagcttcgattgcggcgttgccgattctcgagacccacacagatgttttgccaaaatacggagtggactattgttttttttctttttctttttcacaacatactatgtacggtcacgcttctagctctccggcatctgggcccggcaagccatttggatgatttggcaattcttagcgcagctgaaaaagtgagtcgcagctgaaaaagtgagtaggtcggaaacagaatatataaagagcccaacgcttccccttaattcttgaatcacgcctctcactcatatttgttttatgctcgatgctcttacgacaatcatgcgcggaatatctttaatcggtctgattcttttcctgcgccctcacctcgcgtacacggagaaggtcccagtgaaaagcattggtaccagcttcaccatcaatggagacaaattgacatggcctgatggtcctttcacgggaagcttgacctgcactggccccactaaggtcctcagcctgagttcttgccagcggtacggcacctgctgtcctcccggcaccacccttaagggttccccggataccgaatggcattgctgtggcaagggtcacgatgtgaccggctctaagaatgtgggctatgagtgctgtctgtggggttccaccttcgacggcaacagctgccagagagaggaggtgtgccacaacggcaagcatttgatcggtgggaaatgccagtgcccctctggtcacgaagaggctgccgatggcacttgcaagcctgcgaggtgtcaatcaggcattgaaagtggtatgtcaaccctcttaactttttttttctttctagggcaacacaattaacaaatgtgcaggcaaatgctacttcctcaagggacgatccggcaattatttgacattcaacaaccaatactccgaactcgaattgaacccctatgtcagacccagcaagttccaattctgccgaaacgaaaaatgcactcctggcctgcctatcaaccccacccacgagttctacatgaaggacctccacggcttgctgccagaagcaaccgacgccggactgtggatcgacaacacaaacaacggcggttacattggcaagacttacgactttgccaatgctggaaacttcttgattaccaagtggcccggcggcagatattgtctcactggattctccgagggactcgcgcaggcttatcctgatgtccttcctggtctcagcttcaatagccgtgccccggatgcgtgcattgaattcgagctcaccgaggtgccttgcaacatcagggatgatgcgaacaactgcatctggggaaatggtgaacggtgtggccccaagcccgtgcatcattctgtagtttaagaagatgcatctgtgtcactctttccttggttatttttacgtctaccaatgttcttcctatgcctgagttattaagttgagaggttttgtcggaattttctttctgccgtgttcgaatattgttatgctacacttgtatcttagcaatcagcgtttgtattttattttattgcatacaaatgactatgataagcatctttagtagtctatcagttcgagtaaattgaaatcttccatcagtacggaatatagtatcaaaaattgcattgccgaactccaggtatatattgcggcctagtgctattaatttccccgaaactcacaaaagcgaataaatatcacatacgaagtatcaagaaataagaaaaagtccacaagtaccagaccattattgttatattccaattaaagtatagtgcggcgcagtaacgcgcggcgaccaggttcttatacacagtaggagtattgggatggccaatttagattaacctgcgctattaaaccaagacatacataatagtgtgtatttatagatcgggtcaatatgtgctcgtagctctagacctcaaatctacaaatgtggcttcgtgtaagtaccttcgtgctatctggcttttccaccaatccctgtcgtcaaagtatacatctgctttcccctcttttcccttacatattcctattcgctttgtcttttcttcctccttctctttctcttcatcgttctctctttcatatgtgactgcaattatttgcctctaagtgacaggccacttcctaaatgaccggatactataaacctgagacactccgggttcaaccgcgacttacctggacgttgactccgattgggggaataatacgatcctagttgccctatgatacactagtttaccccaatcttcaacagcccggccgggctagctcaatcggtagagcgtaagactcttaatcttaaggctgcgggttcgacccccgcgttcggctattcctaaaaccaaacctgagatttcttttttgctcttttctttttcggttctatttatagaagagcacgtcaagatacatagtatcgacattttaaagttttgctatgcccgttgacggatggggtagagtattgttggtatctggtttgtttaatcccgcgtaacaggtatcgaagaaaatatatctatcgtttattgatgcaactagagccgtttatctctgtcaactatgtacaacacggccccacaccaagacaactcaatcatcagtcatatcgctacaaggtataaataaaggcccgaaacctctgcgcatcgggaaatgtaacgccccaaattacaccaaaacacaatttcacaacttcgttccctcgcgtccaccgtcactgggacgcctgggccgaagaggccctgaagagtggccggtagcatggctcggcccagccgctgacgatgccatctgggtccgtgttccttcgttttctgtagaattggtgcgaacagcccgtgtcccctggtgaagacgagggttcatgagccactggacttgcatgcgcacactgttgaccgccgcattcgtgtgggctatgtcttccttcatgcgtagacattcattcatgatagccatgctggcgcgagcatctaggtctgtgatagcatgcgaaagttggttgacctcctctcggagagattcgtgcagcgaaagcaggtaggtcgtggcattggatgaaaatacactcgctgcaatgtctgcaggatcatcggtatggacgtcaacacgagtggaggattgctgttctcggccagattgggtagactgtccaccgctttgactgttcgcaaagcgcgtggattcgacaagagtggaccgaatgttggcgagtccatcctcgaatatctcattccgctgctgcaaatgtcgcatgcttgattcaagggaattgagccgggtattctgcatctcaaagtatgggcccattgcgactatgggacagctttgctcgtgtgctgcaatgtctgcccgtcggatcttaactggacatgcgtatttggatgcggcgcaaggaaccgcaacctccggacatgattcaatgtgttcccgtagcgcccccctagtgacaactgtctggcagtcggcacatgtgacctcaagaactggacaaagctctttctcatgctcctaggcgtttctagtcagcatctatataatttctaagaggttaaaaatgaaacaaacctcgtattcatgctctagaatatcttgttcgcaataagagcaccgtcgcactctatgaatacacttctgatccatcccaacgtccttgcttcgcgtcatctgatcgcatgaattatccggacacggcaatagccggtaaccacagtacttctcgacatgcgactggacatggcctcggggaatgatctcttgacatccctccgttatcaatggacatcgcactcggatctcgtcgcacatgttgatcagcaggcggggcacgctagttgacactacatgagtgggattccggcaagaaggacacgggaagtcgtctgagccggtcgagcggaacgtggtgatggccgaactgaggcagctcccgcagaagacatggtcgcattgtagacgaacgggttcaacgaagggacagtggcagatcgggcacataagatgcgggtcgtactcggagacgagatcaaggctgcggaggtcgattagctcgtcgcagttgcggctttcctccatggctataaagtcttgtagattcatgttgtgcgaattccaagcctatcacgggggtcccaagaaaatatgcaaggtaccaacggacttaaattccctatgttgttgcttctttggaatgcggaatcagtgcgcggattcagttttgcgctagataccgaggtagatcgaagagtctgaatccattaggatgacactcagaaaacaaccaggtcagcgatcagagccatatgcctgcaagacatagacatgttaagattgaactgaagagaaggcgggatgactgcgggggatcaaggagaggcaaaaggcggaaagcggttgatccgcactcgttgccgcctattcctcgttttaccatctccactttcaacctcataaacatctcaaacagtctgactttatcttgcttggctgatcggaggtctttctccgtacggaccgtacaaacgcccacgatttatacatctcaacaggctgggatcccacacgtctcatcatgacgaacccttcccagctcttcctactcgccgatcacatcaaattatcccttttggagcgcgaaagagcaatctcactcgatctcgagcctaattcccaagatggagagatctcttggtctctcgagtccctccgagaaagcatagaggcactggaagccgaacaaacccggctagcaaactcgcacgacagcgcaggcgccgccgccctgaaagaccaactcacccctctccaagcccaatataaagacctgtcgatccagttttacggcgcagatggcgagccatcgagcaccaacacgacgcaggcgtcaaatcccgctacccccgatctcaagcagccaattccccaacatccaccttccaaatccgtccgcttcatggacagctccgcagcagcggcagccgtgcaagatgagattgacgaggaagacgagcgcaaccgcagcaacctcttccgtccataccgcgatgagccatcgccgcgactggatcactccaacatggacaacctgcagatttacgaccatcacgctcaaaccatgcgcgaccaggatgaccagttggatcggctgggtgaatcaattggcaggcaacatcagctgagtattcagattggagatgagctggatggccatattcaacttctggatggaatggatggggacgtcgagcgtcaacagacccgactgaacggtgcgagacggcggatagataagatccgtcgaaaggcgagcgagaactggagcatgatgactatcattggattgatcattattctggtcatcttgattgtgattctgaaatgatacccgatccgggtggttaatttggatggctgttcttttgtcgctattactcttttacattttttctttctttttggcgagcgggcgtttgcaactttacgcaatgcgggacgattgattctcctgatgtcttttcacagtggctcgaggcattataaagcaattgactcacttctagactcctggttggattcttgatcataatacatctacaacccttacccttgatcataacctttatttcatatccaattatctgtgagacagaccaagtgtgaacattctcattgaatgcgataaactcttaacagctcgactccaacagcctcacctgtagactgccccaataaaatacacgtgaaataaacgagggccgtgatcgaaaagttccaaaatgccgataactttcacttaatgagcgcccttctggctccgttgcttcgcctccttcgcctccttctgcgcctcctggaaaggaggatcggcatctaactcaccgcgatccgctttgacctgaatgaatccagtatattaggtctgatgaaagatgaaatctaggggctggtacttacctctgcctcgctgttactggccagctcgaatttccactttccactgccatccttgttgttcttgaggccttcttgcttatgggattcgtagtggtgggagagatcatcgcggcctgcttgtggttagtacagacgggagaagctggtgatagtggtgtactgacccctatcatcctctttcaagctccggactgctgaggaatggaacgtagaagctggaacggccaagtttgtccggataacttggcgagatgaggcacggaaggaggtgaggaatgacatgatgtaggtgagatgagtttagatggaatggtaagagtaagtggaagacaagatagatttgggatatatggaggaaagggatttgaaatcaagtaattggaactctcttccgggcagacgggacatttaagagcatctggttcggccaaggtgacagctcctgatgctatatgacatcatcgagttggtgggtcagttatgtcaaaacaaggacatgtgaacgcatgtacaagataatatcagttgaggcgattccttctgagatagatatctgaagatctggagctttggagctttgccatactccgttggtgcgggttgttcttgtagacatttctacatctatagaatctccccgcataaagatgtggagaccttccgacctctaacttgatcttgattttggaatagtcatagtcgccaatatgattcgaaggctttagtcaaaccgacttgactatcttaggtatagtttcctaatcgtgagacgggagccccggagtagcgaagaagattcgggaccacagatgtgatccagatgcgggaaatacttcctcactgtcgatccttagtgccaagtttccttcggcaattatggtcgctcatattcggccaacttgattcccgtccatacttgaaaatatcggaatacatggatgttggattgtttgttgggatagtggtcgtgagcgaagtaccgatgtggcagcattggaggacgcactgacagtaggagatgtcaagagtaggagatgtcattctcgacccacctattattgtctggcaagaaacttacaatctatctctctgtgattggtacatgcgtataatgcctctaccacttctttgctttcctgaaatattgaataccaatgtacatttttctagacgggtttacgtggactgtgacaagaaaattaagtctttcagctattgcaagctacctaaaccatgatagatctaagtcagcgcattttctaggactgacaatataaccgctgttttttcagaacttcagtagtgctgacccttttgcgaatgaggtcgagctaatcgtcttcattctgtggaatggagaaactctttgtgtaaatcaatagatcttaaagccaatagaacgtgtgcaagggactctctccgtcaccttcaagggaaggagatatcgaaatccagagcataatctgatagcacatagtctggagtggctagacccgggctttgtggaatcatgattgaagcgacagggaaccctacatgtagatatctgggttagccatattttgagggacaattggtagttgagaaggagtgattgacgtggctgaaccacttcgttgggctgcgcatgacgtgacctgttcatcctgggggcgacaagtgaccgcgataacggtcgatatcctttatcacccctgagaacaacatagttctagatctgactatagagagaagtctatggaggtgtcaaggcgcgtggtgcgtggtatatggtgcatgatggagattgaagacttcagaaagctacatgtaagttgcagagctatgaaacctgacatagcgaagtgctgggtaagccactccaatttggtgatttagaacaatacgagcctcagttgaaccaaatgcgaatacctatatatactccccgacaccttgctgctttaaaaaaacactttcttgtttataattgtgttgtcaataggctgccgtaggttgtttgatgtttcaatcgttgctttattcccaacaaagatggggggattaggtggtgcatcaataccagacgtctcataggattggccttagtcctcagcgaacttcagcggaagacctgcctaggccgtagtgttgtgttttgaccactagttaaatatttcacaggtattcctatgcttcatctaatataagtctactgggaaatagttcattgaggaaaatgaacaatctatattctggtatttcatatcactctatcaatcatgcaacttaaccaaagacaaataagcagctaaatcacggacaaatatatgcagctccataaatcacaaacagctaacaagatcgagttatatacgcggcgaagacaattgaacagaccgggggacggttgaatggacgcacaagattcctaatgtttatgcctgtctccaagctttgtcttcaatatcaaatcgtatctgcataatagacctcttccagacaaatattctggtgatacgatgtgtacctctggggaatgctgacaaaacaatagcagccactcctttcccaagctctgtgcctagaatggccttatattcgggggtatcgaaatcccaggccacttgctttactgatgctggagatagcaaaaactctcgggaattaggtggttgagttttagcccaaattgtttgtataaagtccttggtgtccgcattgacaacattctcgagatagatatgtctcaaagtagtccgggcgaagtgaatatcgtactgtgcaagggcgacttgactccaccaaggtccatcgtatctctcaacatttctaacgataatcactcctattgcagtcgaaaaatgatgaaagttagttccgtgttttcttattgggtgctcaatggtcgatctctttgagatcttgacatcgtggtaatcttcattacctacagggaggccacacctttcgaggtcatcttgaagggcggggggtcttgcggcccagtggtcgaagtctactttccatcttttgctccgcggtttagcacgggttaagcttctgtattcgaaatctggtgcctgaactgtgcaattgggctcgtctgcatcatcgatccatctttgtcgcaaatctccccacatctcacgcctgccatactgataaatgtttaggtcaacggataaggagcgaacttgcgagggtgggacaatgggattattggcagagaaggcagggtcttgtagatctatcggggcatcgccaggagagaatttgcggcggcggcagataccgaaacaactcaagagacaacaattcgacatctctatgagtatattagattgaattaaaatgtataaaactagagtatcttgagtggtgtattgaatgatgaactcttacttgtctgtatgataccgatagaggcttatatagatgtgagttaaatatatggcgcatactcgaccgtgagtatcgcgttcaagaatatacaaaggggacaacaagaggacaggaagaagaaacatcgttcacaaagagtcgacaaaaatactagcactcgaacaagacagacaatgataatggaagctgagaccaagccccaaatagacactaagaagtggacaaagaaattgagccaaaaacacagagaacaaggagcacaacaagtgtgatgggaatagcaattagacggactattgtcaacaaagagaacattgtcgtagaccaacaaaagagcgtggataaagaagttaaaatgcaagcatacatgtctcgatctccaatactgaaggccaactaggttaaaattcgagatcggcattctcaggccgaaagatgatcattatatagcccggtatatactctgttccaaccttatcgctgtgatatggacttggctgcaaacttatatccatccgctattgctgcctataaccttgcatgcctgttgacttgtatcagacttctgtatctcatttggaagatgtcgaattgcgggataaaatcattcgaatcaaacatgtgcatggttattcaggttgttagcatcttgtgctctaggtttatgaacctatcgcgggaactttagttattctatggagcactacccctgaactagatttaacgtcagcgggtacttctgcagggccatttctccgaggcttctcctgtgcccatacgcatctaagaggaaaggggaaatgacactgccaatcattgccaacgcacatgtgcattagcgtatattgtagtacctaccgtgtattcttggtggggaacttggtattaaaactcgtagatctacctagaattatccatatttagtaggatttagttatgccacggggaaggttaacttggcaagaaccgggtagtgatatataactattttccaaatcaccttagaaatcctattaattgctttagtatatatcgcactgaacagccgaggcatcttttcaaatgaagaccatcttcctaagtgttctcctgccggcattagccaaagcgacggcaacaagtggtaaattcactgcgctgagcttcaacgtcgcaggtctgccatcactcttccaatccaacgatgtcaatggcacaaagagcgaaaatgccaagcagctcggcaattacttctcagagtatggctacgagatcatccatatgcaggaggtattgctccatcgagtcttccatatatcaataatctaacaacgctctaggatttcaactatcatgcctacatctatgaaacagataaccacacctaccggaccgctacatctgggggtgcagccatcggaagcggcctgaacaccatttctaaccacgactgggtagatttcggacgtgtgaaatggaacaagtgctccgatgcatcgggctcagactgtctgaccccgaagggcttcacattcatgcgctggaacccggccgatggagtctatgtcgacttttacaacgtccatgccgacgccgggtgagtaaaagccattctcacattttaatcgatccaaggactgacctccgtcaagaatcgaggatgaagacgaaactgcccgaaactccaacttgcagcaagtcgcagattacatcgacacttggtcgactggtaatgcagtggtagtcatgggcgatacgaacagtcgatacacgcgcgccgatgatacgggcatccgcgtcttcaagtctcagaatagcctcacagacccctgggtcgagcttgagaaggatggtgtctaccccacggttggagcagatgccttgctatgcaataacccgtcttctgtgcagacctgcgagacggttgataaagtgctgtaccgaggatccgaagttgtgacgctcaaggcagacagcttcatctatgacggtgggaagttcacaaacaccgattccgaatatctgggcgatgttctctcggaccacaacccaattcttgtgaacttcacctggtcgctttcgtcatcgctgcgacaaagtcagttctctggaggtccgcatggggtgtggtttaatgatctgccgagtattccttcatcgcctgctgtttctgtgattactttctctggtgcggaaaggctggatgccgttgctttagagttgaaggatggcacatcgttcagccatggaggaactggtggcactaaggtctcccttgcactagactctggggagcattggacggagactaagctctgtactgggcagtatgatagccacactcgcaacttttatatcaaggctactaccagtactggtagaaccttggaggcaggcacctcaactgataattgccagacatttactgtctccgatggctttgcagttgcgggtttcatgggacaagccgaggacgagatcgatcaattggctttggtatatgcggcctactaaggaccaaggaaaacgattattccagatacgaatctgaatatgcagttgtttatttgccattttggtcaatcgtatcagatcatttatgcagtgtatgtcccaaacgccgaggtattccgtagaacccttatccatatgcaccgcgctgtgtaaataagccaacaaaaacgagcactttaatcaatcatatcctctggaagaacatcatccgggttctccccaaccgcttgtccgaccaagcgcacgacgcgcttgattgccttggacgcaggactgtcagggaagttatccacaaaactctcaccaaagtcgcacgccatgccaacgcggggatccagaggcacggcacctaggaaaggaatgcccattttcttcgccagccggcgaccgccgccagttgtcgctcggaatatctgcgactcatgcgtgcagttaggacagacaaatccagacatattttccaccaagcccaacaccttaatgccagccttgcggcagaagtcgacctccttgcgaacatccagcaatgagacttcctgcggggttgtcacaacaacggcaccgtcaacgccagactccttcagcaaagagttgacggacagatgttcatcagaggtcccaggaggcgtgtcgacaataagatagtccagctcgccccagtccacatccttgaggaattgcttgatcagtccgttctttttgggcccacgccagatcaccgcgtcgtcacggttgggcagcatgaattgaacgctcatcgcgcccaggttatccgtcacccatacgggactccatccggcattgctgatgtgaatagtctctgactccacgcccatcatcttagggatcgacggaccacagatatcggtgtccataatgccgacggtagagtctggatttgcggcgaaggcgtgcgcaagaagggtcgagaacgtagatttgccaactcccccctttcctgagagtactaggatcttgtgtcgtatttgggagagtcgttcggtgatgatcggaatgtcggggtcgggacctttaggcgcggtggcgcagatctgttggttcgggcaaccggcacaagcatcgccttggccagcttgctcggattcagggcctgggcagtgttctgtggagagttagtgtgtgtattgcggcaatggatttagagcatgcgtacctggttcgggagcgacgaggctgggcgtcactttggacgacactgcaagggattcctcatactcctccaagtagggcgccattttggattgctactctatgtggcaattgaaatgagagcaagcgcggaaaataagaagataattgttacgccgttgcaagaaacagataaattcgacgtccggtggcggattgatgcttgataagcggagatgactaaaaccccactgcgattggcggggcaaggcacatctgcggtgtcggagtgtgaaatatctcatgttacatattgatatattgatcgccatagctgaagctataaagtactggggggaataaggcattttaaagaactagcttctgatgatacataattagttgactatctcttatgtccacttgccaagccgaccagatctgtataggatacgagattacttgatcgggctcgcatcactcctttcagcgcaagaaggtcaatatttatctgccttccttcctgcttctcttagggggtttgtttgagcgcagacccggtcgtgttgaaaagaacctcagcgctagccaaatctacagacacaagtttcagagcgatagtcgcaaacacttcagactcatgtgcttctttcctctaagattcgaactcggcttttttgcttctgcagcatcgacatgtgcttgattcatatgataatcaggatttgagacaaattttccctgcttagtctggacaattgcgcgatattgttcgatataaacacagagtaaccagctcagattgcagctcaactatctaataacacgcattgaagactgatttccagttctatccgagcaggcggtcgatgttgcagtcttacgatatttcaagccttgtttgaagcagctcttcgcatctccaacatgcctagcaactggtcggactttcgctttctcattttccagaatttctgtttctccacagatgtagacccggtcatcggatccctcgcggacaaagcactcattccgctcatcgaggaggccgaaagcggtattcttccgtaactcatacacactctgtacctcgtggacatatctaaatagtccgtagggttaaagaatttcgggcctatcagaacctaatggccagagtcttgatctagcgcttccactgcagtatgatggacgtggctcagcgcaaaagattgcatccagcatgctcctaggacaggctgcaacttggattagattatcccccgttgtatatcgcgtagtacatacaacccagtgagataagtaagcagtgcactattatgagtacccgttatcaatctcgaacaacggcaacaaggggtttcaattctcgcctggacaacaaccaggaatttggattggatgaggccaagtacccactggccgtggatgatctcattcgcccgtggaacttgcagacacgatcacaatgcattttatatacgagcttgggctcaaagggaaatgcgcatctcaatctaagcaggcggtaggtgtacaccggtatgtgcacagtgctactcggacaactcgtacagctcgtacaacctgccgcacttgccgcactgcacgataccccgctgttgatcggtgttgtatactacccatgggcaagagaggaatggatagacagaagacgtggtgtagctaaaagcctattcaaaatcgaatcagacgagacctttcccaacaactgtactttatcgcgaagaaaccgactaagaccacttagcgttggttgatttaaagggccccatttctttcccattccgctccattcggaggcccgcatctctcgagagacttcacgagtctcaacggttccactcttttgtcgggattggtataaataagaactggtctcctcggtaaatctttctccttgtctttcttgagaaaaacaaacaaaagagagacctcccattgtccggaccaaacccctggacaacaaaggtgtttccgttccccccccccccaactgactaagcatagttccgcttttcgattatcacatgcttctgccgtcacattcggcctcaacagttttctctctctcaacacccttgtagagtggaacaccatggatcaaggcctttcaacaggggcccatcaagaaattgatgggttacgtgagagaaatacacgcgtcgattcaacaatcggtcgcgaggctttaacagcctttggggaagtgcagatcaatgataaagatggcaaagaattgaagacctttgggagaactcccgatggaacaggtaagcttgttatgtattaatcatgtttgtattcgaaggtcttaatcggatgcacctaaacctcccgttgtatttcatcgagcccgctgctaactggatccgatgtatcagtgtttacggtccctcggactcatgacatggtctcccagttgcttttgccgtccgagccaaagaatttcggtgatcttgtggtattgattctattggcgggtcatattctgtttctctgggcacttcccaagggtgccaaaatcccggtctttgccgccacctacctcttctggcgcctggcctacaatgcaggaattgggtggctgcttcacaatcagtcgcaccacaagacactaattcgatgggccgagaagaccaaagtgtttgtcaatccagccactgggaagaaccctcaccctaaattgtataattggatcaaacgggaattggagaccaagatcccgcaggattactcgttcgacaatgctccaattgaatacaacacctggcttgtttttagacgtcttgtggacttgatcctcatgtgtgacttcacttcttactgccttttcgcgatagcttgtggtcaccaacccgttgacgagagtattctcatgacggttctccgatggtccgcaggtattgtactagtgctgtttaacctctgggtcaaactagatgcgcatcgggtggtcaaggactatgcctggtattggggtgatttcttctacctcattgaccaagaattgaccttcgatggcgtgttcgaaatggcacctcatcccatgtactcggttggttatgcaggctactacggaatctctctgatggcagccagctataaagtgctgcttatatcgatcattgcccatgcagcacaattcattttcctcgtccttgtggagaacccgcacatcgacaagacttataacccgccaccacccagaaagcgctctactacctgtgcggattcttccacattgcccaccgatctagacactccgacagcgccaactccatctgaagaccagactcccaacgcgacatcttcgtattcggccaagccgccgcagtccgttcacaacctcctcggactgcacaacctggatttgtatagaaccactgattcatcaatcatgctggttcaacttcttgtattctctattacagctttgacaccctctacaccagggtatcagttactgttcgtggtcctcgctgccgcttccagaatctggtattccgtaggcattgggtatatccttcggaaccaatccaattccaagtcttggacaaggcacttcgtcaaatatggtgacacgccgcaggaagcgtggaaccaatggaagggtacttatcatctcagtatgatcttgtgttactctagctttattgctgccgtgtggaagatgtacacattcccggccgattggaactatggtctggttctgttccgacatgtgctcggagctggcctaatcagtctgcaaatctggacttccgtcagtatccatgagtctctcggtgaatttggctggttctacggggacttcttcttcgatgactctccaaagctcacctacaacggcatttatcgcttcctcaacaacccagagcgcgttctaggtcttgcaggcgtgtggggtgctgttctcatcaccagtagcggagccatcgttttcctcgccttgctgagccacatcctgagtctggccttcattcaattcgtcgaacgccctcacatgcagaagctgtacggtcgtagccttcgccaggatgcgggtctcgttaagagtctgaagcggtccctgccaccctctctcaagcaattacacggaagtgttgacaagatgttcgatgactcctttgagttcatcgaggagatgcttgacaatgcccggcccaaactagccgcgggagtgaacacctttgttaaagataccactgcgctcttccagaagtaccctgctcgcgttaccatctcccgaattgatgcagacctggctggattcgacgcccgcgattattctctgtcggttgaaggtaccagtgctctttccttcgaggagagcgaaaagaacaagggccgtgaaggtgcaaacgcacgcatgcccctggaccgccgtggtgatctcaaggacttgacatttgaatatggcgccccgatcaaggtcaaatggactgccccactccaccacagcaagaaagattggattggtctctaccgggtcacagacaatacctcgcgagaggtcactcgtgtttcatcgcaaggccgctgggtcgcaaccaacgaaggcgcatacgacaactcgacctgcgagaagggtatcctcactagtgatgttgttacctcgtcgtctgagcgtcagggccaggacccctgcgagttcgcatctggtgagatcgttctttctggcaacaagctcttctggaccgagggtgtctttgaactccgctaccaccacaacggtatgcacaatgtcatggctatctcgaggccatttgagattcgtattcgccggtcggatgaggatgaaactatttccgacggttattcttttgtggaatcggctgttgaggatgccttgttgcccgttgttcgtaactgtttcgatcgtgatcctgaaattgccccagagactgttgatgagcagttcggtagccttgttgaacgggatggcaagtttgccaaacgtgttgtctttgctgttcatcagatgtaagttctctttctcaagatcatttcaatcgttgatcatattctgacccttcgtcatgcaggttcggtatcgagttggcagctgaggttgtcaaggccgacggcaacgtgcggaatctggcttggagaatctgcaacgccaagaaagttcttgtaagtatcaaattgcaggctgaaatctgcttgttggaccaaagctaactcgtcaacgatgcaggctccctacagcatgtcaagatccaatggaacgacgacaccagtcgaggagagcaaataatgatccatcgaggcagattcccgatacgtcaaacccagccatgcacttatgttggcagacgacgactcgtgttgaagacacgcctcaatctcaagtggatttggcattcgacagttgagtgctttacagcaaaaaacaaaatcaccaaatcacaaaaaaaagaaacatgtcataactaggagaaatcatgtgttgaagaaaagaggagttgtcctgttttgcttttcttgcctcgcatgtaaatgatgatgcgaggttcaagataatgattcccatgatggttttgtttagatttcaggggttgggtgggttgcagtggtgattttcatgtgtcttgccttttggggacgatttggctgtgggctgattactttttcttctctacttcgtacatagcttcaagagaaatctattgctttttttgtgatcattgacttagttctctaagactcttaggggaatgggagacataaaaccactcgcaataccaatatatcggggcttgtttgatagctctgaagagtatatgataacaagtaactacataagggcctccaacttcaaccatctgctcttagccttcggctatcagttctagtacgcatcggaaaatagacccggggagaaggcatagatgcagcccacaagtcgtgggataagcaatcaaactcatttactcgactacgaagatttcatgacgcagatgtttgctaatatgcatgtattgaactaaactatatattatggtatcgaattggagacctaggcaaagctttgaatgctgtcagcgaaagtccaaagacccgaaggagcgaaacaagcacgaatagcttcacaattgcaagcaaaagtagaagcatatatagtattcagtcaagccggttaactcatcccatcccctgttggcccctcgcaccgaactgtcacccaagacggataagcagcccagcattaggaaaccaacacaagccaagtatagcagtaccatgccgcggacaagacaacaatgcaaagaacgtaatcagacgacgacaagcccaaagcctccaggctccacaaccttcctccctttcacacccgaaggcacgacaggtccagtataagggagatggaaaacagtggatcgacgcctgtattcctcacaacgctgtacggcttgggtgcaacctgaggggcggtcctccaagaggtcgttgaatggatagactggttgtcatcataatagctgggggagatgtgcagttgaaaaagacaatgatgtaccttttggatatatgaggtagaggaccaaacaattgatggtttacagctagatctttttgagttgttagcactcttgtcactaacagggtggttgaaagacaatgataatgactcaagaaggatcaggagtttttggtaagtgttttgttatcttcaaaaattttgcagaagcagaactgaaaaggtttctcatcataatgagtgcaggtgggaaagtaaagaaaaaaaaagaatgttcttaccttattagttcatatttctcatgtaatccaaaacaaacaagagtgttttattcctgtcttaagcaattgttagtcgctgatgcgtagcagtagaatatttgaaaacaagagtaaaattgttgtcattatcagatggtgatgcatgtttgttcatggcccattttttgtcgccaaacaggagttggaactctctcgatcatgtagacagggttggagggtttgaagggtactcacttatagcatattagtgatggatgtagtaaaatataacaactatcatcaagattccactccctcagcattagaagaagtttcctcagtaaattcagagtgtgtgaagaagagaaaggaaacggaagagcaaaaaatcgaagaaaagtcgccaaaaaaccaaacggcgctaggcggtggggcctacaaacagtgcaaactcccaagatttccgtttctgggactttgaccaggatctctcgacagcttcagttttgcgccaaatcacctaaaatggctgatagaagacgtatcaatgggccacctggtggcacaagacctccagtctatgcatccctccaagaatcctcgacaggcgtcgcaaaccgcgcccagcgccagcgccaacccaccgagctacggaaaatctgtatgaattgccgacaagcttcttgttgatcgcagctaaccttcaatgctctagttctcaaaacaggactgattccaaccgcctcaggctcttcatatcttgaatttgaaccatccgcttccctcgccgctgcccgctccaaccccaaatctctgatcccgccctcctcagcactcaaactggcttgcactgtccacggaccaaagccgctcccccgctctgctgcattctcgccgaacctcgttctcaccactcatgtcaagtacgcgccattcgccgcgcgcaagcggaaaggacatatccgtgatgccagcgagcgtgaccttggcgtacatctagagaccgccctccgcggcgcaattatcgccgagcgctggcccaagagtggtctggatatcactcttacaatcattgaagcagaggatgaccgctggtggggtgatgctcccgactcgcatgatgcgtcttggggaatgatgaacgttctcgccggttgtatcacagcggcttctgctgccattgcagatgcccacattgactgtcttgaccttgtatccggtggtgttgctgctcttgtctcggacgactcaaatcagtcggcatcatctgccccgcgactcatgcttgacattgatccagcggaacaccgatcgattttgtcggcttgtgtggtggcgtacatgcctgcgcgcgatgagattactgagctctggcttaagggcgatagctcaagggtggaccttgaaaaagacgatggacgtacgggtcatgaagctttgatcgacggagctgttgatgcggctcgtggcgctaatactgtcttggctgaggctgtaagggaatctatcgctacgtcttttgctcgcgtctaaaatactcacaacacataacgaatgaatgaagtttattggctctatcattaatgtagcaataggctaatttttgtgttcctatttaccgatccatttgaagctgtgtcacaagactagaagatgccctagaacgcaagaatatagttatctagagtagtgggtttgtaaactgatagcctaagattttaacaagctactaggtgtttttactccgtacttgcttttataatcctacctttttgcatgtaattctccctcggtgttgttgtcgtccaaaataggtaggcttcattgatatacaacggagactacaacacatgatcgcagtaccatactccgtgggtcgcctttcaataatggtatgttgttagttagagtatggagtagttacaagacaataatttaattgactaacataaatattttcatgttctaaaaaaaactggtcaaagccaaaaagaaaggggtagatagagttggacgttagattctcccataaaacaaattatgccgatctacggagtaggcaaggcccatcggaatcgatcgatcgtgggacatcggatctaagtagttcgtggcatacaaccaatgggcacatacaatatgttgaacaaagtatgaagtactaccacaataggacttagaaggagtagataactcctgcagcgttttggcagggttcaacatgaaagatcgacctcaatttgcccctgagagtgaacatagtacggtatactagtcatgtactccgtaatacgtacaacataatatagcgaggaggacgctactgcggaaaggaatccgagacccgctccagagacctttttgctctttgtccctaaaaccaactccaaagctccatccgactttagcactattcaaatagccagagcccggccgtaaatggtacagcgtatgtacttggttcatgtgttcccgctaagcagacggctcacggtctggcgatcacctcatcacaccaatgaccggcttgcgcggaaattggaagctccatcgcatgccacaattcaagccccgaatccactatcgttctctcccgttcgccagaattagacattgaaacccctcgatgaaccgctgattggtgcacgatcgctggtggatgctgttggaactcactagagcagcttctcgcccatcgaccagcgatatggatcctgtcaaaaaacttcacgtgtggatcacagctttggatggggcagcctatgatccagtctgaacgttttcttccacgcgctgcgaaatcgactcattcagatctagttctgggtaaccttttttttctcgagattggctcgaaaagaaagggaaagactcgactcgagctgcaattgccgaatcatatttccaaacaaagaaataagggcatacggagtagatcctgagaaattcagatcttaggatcatggagaagaccgggtcgctcccccctgattcagacacaagaccggcgatagatctgcactctgctgtgacaagatacatagtccgtactggggccctgttctactttttgggacttcgcgacttgactaacttgactttcttcttctttttcctgccttctgatgatatgacacctgaactgtgtgacggtcttcaattcttccagtttagatgtcatgacatcaacttgttcaattctttatgaccgctggtcttgtcgctctcttaattattagcttgactttattgtatcttattttcctctcgtttacactaccgttgtccttcattttccaattgcgcgccggttttgcgcttgatatctacttcatttcttcaagatggtgccattaaagaaactattccacacggacaagtctctttctcgttcagtaaccacccctggacacgaggactgtggaatagacctacgctattttcaaacggcggttgactcgcctacacgaagtccatttgagggtggtttcccgtccagaaattcgcagtcactagatgtgggtcatcattttgatcagatcgaaaagcacttcgaagatctacatgatagactggaacggccgatatctcctcaaccccaattgcagcctctcagcactcatttcgcgctctctaaatctcaaaatggccgacatatcgacttgatggaagctctgttctccacggatccaacaactaccccggaaccactttctcctcctgctagtctatacaacgaagatgttgcggaacgaaacatgacccggtttatacggattcagtaccgcaatggacttgctagctctggtatactttcggccctataccaagaggatgtggccgacagaaatattgcaaaatatagcgcacctgctcgccctttgtctcacttaagttctcggtcatcgccagctgcgcctggtacggtacggattccagaaagccaacagcgcaaagacaggaagcgggaaccagggaagcctagctggacgtcagcagaaaatctacggacacagccctcgccagatgatggctcgggtacttcatctccacgatcacagtcgcagcttggcaatcgcctcagaccccagagatctgcgccgagcctctctgcggacgaaggcgttgtcccacaaggaaatgcacccccagctcctgtctcgcgtttgggcgttcctcctgcctataaacaaggcaaaaggtggagcaacactcctctgcctgatagtcctacaattcctatccccatgggtgaaagtgacggcaccgcggaggcgccacgaccacctgctacaatagaccgcaggacacaaggatcgcttcctccgccacagttatcagaattagcctccaaaaagaatgcgcgaggactttcaatcaatacaaaattagctgccaaaggacgcccaaaaattgcgcatcgtgccatccagccaccaacaccctcaacttacgaattgacgcaggcacctagcatcgcagaggtcatgaacagtcctctgcctgttcccagcccaatcagtcccccaaaatcatctccacgcttcaaaccctcggacgtgatggaatttttcaccaaggcttataagtccgttcaaagcccccacacaacatacgagacactgcaggacgccatagtccgcgaggtcaattcccacgaggcattccgtcgagtccccgtgcccgccccggggcctccattcacgccctcagcagaccaagccgaattcagcaactgctccagaccagcaacgggactccaccgaagcgcttcagcgaagaagcggctcatgaacaggaattcatacaagcacaagagggcccccgaaacccgccgtagcatctcaacaagtgtcggctacgaccgcctcctacgaaaagtctccggctcccccgctcgccgtcgacacactgatgccccacccccaaccccaggcttcctggccgaattccaacctcgcacagagcccatcatcacccgccctggatccggagagccaatcacgtatctggatgtactgcacgcaagcagtgagcatcaacctctctcaaccggcggctgcgcaagcctctctgtacctcgcaaacaaggacgctcgaaatctatcggcgacctctgcttgggctctaatatgccttttgtccccgggacagtctactgtatgcaagctcactcggctccttcgagtgattcctcgcatgaagacagcgacgatgatatcattcagcttcctaacccgtgtcccccgccgcgtgtgcagattgaatgtgtcgacgagaataacgtccgctatgtcattgatactgcttcgccggatgaggcacacaaacttatgtactggcctcaccaggttcgccgcaatggtaccaccagtccttacgggaatagtctgtcaccgttgtctcgcgctcgcatgcagcttcgtggttcgcgctcggttgagacttactaggatggaatcaacgttctttttgcaacccaggcgggatgtttctattttgccgcatgataacgatgctcccacgactttctccctctctctcgccttcttgcttcctccaaaaaagccgttcaatccgttccaatcttggccatgtcgaattaaccttcgatatgccggccaatccttgtcataatcatacaccttgtacccatatatcctgtcatatattaaccctagtctatctctcatccttttttttttctcttgtcttataccggacctccaattatttccttatcttgtcttattgccgtgcttgcatgatttggccggagttgcttattattattacaggtgtatattaaagctccatagcgtttgccatatatatcaatatcctattgttcgccttgcaatatttttctctctcttcatagacgaaatgggtattgtttgccaatttctttgccccctgtgctatggtactttgatcaactcatactatcgtatcccactacattgttcttttccgtatcagcttctgtttctcgttcgatagaggctcggcttaggatttcggatccccagcgtgcatatcttgtgctatttgtgcgctatttattgatagcttgacactggtctacgggattgccgataaacgaaaggaaataaaatcacagaaaagcaataataatgacatgtctcattttcataatatcattgccactacctgccatttccccttaaaactccacattgacaaatcaacatattgaagggacgccttggaacccacagaagaaaatgccatattgtctgatacttcgacttgtttcactatgaaccggagagtgtcgcaaaatacaatcccctcggtactcgatggtggcggccactggtgctttggactgcatggtagttctggcggcagcagatgcaagtcctgatatggatgcaacgcaatagcttaatatgagcctatatcgagatagttagcgttttgttaagaatcattgaggggtaagaaactagggggtagaaacttacggccaaacatgcaccacttctcagcgaagcgctggcacttggggttgcagcagggagtaacaccctgctcaataccctcgggctgctcgaaaggaatgcacagagacttggcgcccatgctgggagccttagcatcctcagcctcgccggagtcttcctcggccttgcgggcactcatttccttgatctggtcctcgcactcctcggtcaagcaatggggaatgacgcagaggttcttgttgttcagagcgggaacaaagtcatcccacttggtgatctggatgcggtgagccttgaactgctcgtcggcgcggttgtacaggtcggtttggatggtctcaagaagcgcagacacgccagtagccagctcggggatcgggatactgcccttgccatccttgccggggatatcacggcgggcggtggtgacaaagtggccagcggactcgccagggccgaactcaatacgcagaggcacaccgcggagctcgtactggttgaacttccagccgggggagtagctgctcttgtcgctgtcagcacggatgccggcggcaacgaggacggcgacgagaccgtcgacctcgacattgagcttctcgcgctcctcttcagtggtcttggctgtaagaccgactggaacaatgataacctggacctcagccacacgaggaggcaggaccagacccttgttgtcactgtggatcatgaccatgacacccagtgagcgagtcgacagaccccaggagttctgccagacgtgcagagggggcttcttttcatcgaccgtggaggtgggatcctcgacggtgatgccgaacatcttactaaagttctggcctaatccgtgggatgtaccaccctgaataccacgcccagtggcggggatgtagccctcgacagtggtggtgtagttaccgccggcgaacttctccttctcggtcttctggcccttaacgacaggcacagcaaggagctccttgtaaatcttggcatagtagtcaaggatgctcaggacttcctcgcgggcagcaccttcagtcaggtgagcagtgtgacctctgcacattgttagtatgtcattttcaactaagaagaatgtcaaaaacatactcttgccaaaggaattctcttgaacggaggagtggttgagggtgcttgaattcccatctcactgtggatattagtaacacttcgagggtatggagaaagaacggagaccgcaccgactgagttccactggttgagacgaagggggagatcacggtgactgcggatccacttggcgtagtaggggtacatgacagtctccgaggtcggacgaatggcaatcttcttctcgaggggggtcgagccactagaagtatgtcagtgtagtccaattgaattataaaggtattatagggaagggacggcatacgcgtgcgtgacccaggcgacttcagcggcaaagccttcgatgtggtccttctcccgctggaggacatcctcagacacgaatagagggaaagagcagttcttgacacccatgcccttgatggctttgttgaagtattcctgaatctcctcccagatgaagaacaaggcaggcttgagaatgaagcaaccggagacatcatagtagtccagcaaatcacccttggtgagaacctgctggtaccagccggagaagtcctcctccttcaaaacatcaataccgatcaaagcggcaccatcaaccttcttcttagaagctttcttagcctcttgcttgccaatacccttctctcccttatttgaggccttcttgtcagccttatcggccttcagtttcgcgagcttcgcggcttttttagcggcgttctttgactcacccgccttgtcatcggcgggggtttcagtgcggtcaggcaaggtctggggcgcagcgccctcgggggtgcggtcttcgctggggttctggctagccatgttgaagaagcgagtgtctgactagacaatgaaggagagacccagtaggattgtaagcaagcgaaatcggggtatgactcccctccttgaagtgggatgcgatatcgaaaattaccagcacaccgcttcggcagaacttttagtgcccacagcacccccccagaagccagacagctctgccatcgcactcgaatagctcatatcacatcgtctgttttaaatatggcaggcatttttgaggcgccgcggaatgcggacacgctctgtgagttttcatctgaaccatcatcgttttcgttgcaataaactgaccattctcgcacagtcttgggtgggcagaaaatcaccggtgctgatgtccgtgagcagaatggtatgttgaattattgatggatttcccgttcttggggatggataactgattccttgcagttctggcaacacaagccatcgctaatgtcatcaaatcctccttcggtccgtccggtttggacaagatgatggtggatgacataggggtatggaaacgataaaccccgcagagcttggctgcaacttctaacatctgacaggatgtgactgtgacgaacgatggcgctactattctgtctcttcttgatattgagcaccctgcgggcaagatcctcgttgagctggcccaacaacaggacaaggaggtacgggcctctacaacacattttcaaacgcacacgctgataatgatttcaaattcaataggtcggagatggcaccacctcggttgttctgatcgccgctgagcttctccggagaggcaacgagttgatgaagaaccgtatacaccctactacgatcatcaacggataccgaattgccctgcgcgaggccgtcaagtatatgaatgaaaatattacgactaaggtggataatatcgggagggagagcttggtcaacattgcgaagacttccatgtccagcaagatcatcggttccgattccgatttctttgcgaacatgtgtgtggacgcaatgttgcaggtgaagtctttgaaccagagaggcgaagtcaaatacccagtcaaggccgtgaacctgcttaaggcccacggaaaaagtggcactgagtccgtactcgtggacggttacgcgttgaattgcactgttgcttcccaggccatgaccacacacgtggccgacgccaagatcgccattctcgatatgaatctgcaaaaggagcggatgaagcttggtgttcagattacagtggaagaccccgatcaactggagaagatccgtcagcgagagtccggcattgtgatggagcgtgttgatatgattctgaagtctggtgccaatgtcgtcctcacgaccaagggcatcgacgacatggttctcaagctcttcattgaaaggggggccatggcagtccgccgctgcaagaaggaagacctgcgccgcattgctagggccaccggtgccaccatgatcagcaccctctctgacctcaacggagatgagaagttcgacgcatcacaccttggacacgcagagtcagtttcgcaagaacgtatctcggacgacgagtgtatcctgatcaggggtaccaagatccacactgcggcttccattattctccgtggtgccaacgagtacagcttggacgagatggagcgctctgttcacgactctctgtgtgcgatcaagcgcactctggaaagcgggagcattgttcccggcggtggagccgtggaaaccgcacttcacatctaccttgaggaattcgcagtcacagtggtaagtaatactgttcgctattctttgctcccatatcggtttctaacattttcactaaagggctcccgtgagcaactggccattggcgagttcgcacaatctctccttgtcattcctcagactctggcagtcaacgcagcgaaggattcatctgagcttgttgcccagctccgtgtccgccacgccctgtcacagcgtgtgcaggatggcgatgctaacgaggaggagaaggccattgctaagaagaagacctaccgcaactacggtttggatctgacgaagggacgggttcacgacactttgaaggccggtgtgctggagcccagcatgagcaagatcaagcaactcaagagtgctgtggaggcttgcatatccatcatgcgtattgacacgatcatcaagctggaccccgagcagcagcaggatgacggccacggccactaagcctaagcttactttgactaccccaatccccaaaaaaatggcagtaatatgatgtgacatagatgatcagcagtagtaaattctcatttccgctgcactgcatatgaacgaatttctcttgaagtagatacatgaaactcgtagccctaaacaaccattctactagatctatatccctcactgccgcctggcagccatcaacttccggtattcctcaacgatattcctccgctcaccagccaattcctcacggcgtctcaaactcccaaccgcagcaggcacattggcaacatcaaccttagccccgccacgcactttgaagatctcccggggtttgaccaattgaggcggcgctttcgcaacctcaaatggattcctcttccgctcctcgtcgcgcttcttcagcttagcccaaggatcaggatcatcatccccactatcagcgtccccattagcattcgtccccttcttcttgcttttcttcgcagccttcttcttccccccagcagcctcaatctcccactctttccactgccgcaactcaacctccatctcttcctccctctcttccctctcctcctgctccttgtcgcgaatcttagcgtcctgctcacgccaccccttctgcaatcgcagcaggtgcttctcatgcttcgtccgcttgtgctgctccttgttcttggcatcacccgtcttgaccgacttggtcatctgcgacaatggcatttcgcggtcaacacgtgccacaaactcggccagccgctcgccaggcatgattttgggcgtttcggtcttctccttggcggcggttttgggtttttgtgtctccgctgccttcgcgggcttcttcgatgacgctgttgagtcttctgtagcattgcgcttgcgcttgttcgggcgctcgcccgtctctagccccgatggcgctcgtcgacctgtctgctggtattgcattaggcggcggaatgctttcggggtgtcgtcttcggtgacagtcttgaggcggtgggtgggtgctttgttggcgctctggttctggtctttgccttggttcttgttgacgagttttttgccattcttgcctagcttaggcttgactagatcgcggactggaagggctttcgcgatctctgagggtgggagattgaagtggctgccgcgagtggaattgtcagttttgggctttggataaacttagtaattactagtgctcacgctatatcggcttcgccacgtctcttgtgtttgtgaggcattttgggtggttttgcaatggaagtttggaggattggagttgttggcggaactttttttcatcgaggttagccttatcttacttatcgctctatgggcggtccacggatctccccagcattcgccattccaaatatcagtctattggcatactcgagaaagcagtaattgaacttgatgaatgagggatatgtttgttcagataatgcaaataagtccgagataaagggtatgcttcgctaataatatgcccccaaacgccagtaaaatgcccacaggcaaaaaaaaaagaacacctaggaaaatgcaaaacaagaaaaatcacagaagaaaccggggaatcattcatcttcatcgtcaattgagtctttcatatcagcccagccacacatgtggcgtttaccctcagtttcaccaccgtttcgaagctcgcgagcctcaggtccctcacgccagcatcgagcatcgtagtcatcactcacggaaatgagttcgccagatggtgtccaggacaaaccagtgacctctttctgatgaccttcgatgaggggagtgcctgattggtaaattgggatggtatcttcgagacggccggacaagccgattccagagttggtgcgacgaagacctgagcgagtggtgaaaagggaagacctgctaggcagagattcggctggtgttttcacggtagaattgagaaatcgttcatcggtagggaagaggatggggcagtggtcactgctcccagttgccaacatctccggatgatcgtagcttgctttgcgcacagccaacttcacatagaatgaggatatttggaggcgaggatggcggaaaccatagagaggcccaagaccgtccttgtcggagcctccagtccttcgtggacggttgttgttgagcgagagttcaggagcatgcccgagaattaagtgtgatgtcgaatatgtgtaaacagtattatcccggcaaagtgtgtataagcgtgagccatctcctccaaatgccatggaagttagaccaaagcgtcggtacttcacatggctttctggctcttgcgttgtagatagaggaatgacgggtcgaccacggcgattgttatgggctgttcgcaaatcccacagtctgacgcttgcgctagcctcggaagccgtaacaaaaagattttcgcgtccaggcgagagaaaagcgagggaagtaacggtgatgtcggttcggccaattggtggcgcatcatttttgtccgtggtcggtttatgagaggtcgtgtatgcatgagcaccttgaatggtattcagaacatgtgggtataacatctttggctgcgcagtggtcacgacattttcggtctcggatagggagcattggacttgcaatgcaggccgttcaaaccccttgcagcggagatcccagatattcacatttccatcccgactgcaagtagcaagaaccttattgttggatgctggttggaattggacacgcttaacggaggatgagtgattcgataagcagtggataggtcgttgtgttgtcatatcaataataagagatgtttggtctccagatgctgtagccagtagcatgtcgtccgatgagaactcgagatccataatcgaattcatgtgcggacggaacccaaggtatgcatcagcgaatccaggatcctcgtcaatcgatgaatccaagagccgaattccaccctcttcatcgcccactgcaacaagagaatttgcttcccatttgttagcatgtgtaggatcagtcaggtaaaatatgactcactgttgcatgaagcattacaaaatgggagggccactgaacgctccgatccatagctagaacacatgtgacggtcccgcggtttcgaatagaagttggaagttagatcttgccagcctagagaaaatattagaggtgtataagaaagccatggggtaaataccaaccagcgccagagttagatcgtagagttactttatttgctcgagcccccatcacatttcgcataaataaagcaccggatgattgcaatgcctgggagcggcgcacaggggccacggggggatttcgtttaggtggactcggcggtgctgatgcatcaaggcggatgttgatgtttgaaattttaatatcttgttccacatcctgcgtcggagaccggacacgaactctcttcagaggcgaggattgcggcgagacgactgaagagaatgagttctttcttttcctgcttggggtgcgaatgaagtcctccggtaagccatcgtgggggcttctggtgctgccagccttagaggttcttgaaaaggccggtcctagacgattcaccgcgggcgatgatagtgcccgtaatgcctggcggctagttgagggcgtgatagaagtatccccgactggtaataaagagcgtggggtaaagaatcgacggaatgaccggggcgttacagtcggtggctttctaggtctgcgagtatcggaagcaatagacggcggggatgagggtggctctggaggaaggacaggctctgaccggggtacttccgggagattgaaggtgtccattgtgtgttgaacaaaaagcaaagagaaaatcaaaggctatgcaagcattggtggtattggtggtggctggaaggctaaagagggtcagagattaatcggggaagttggatcttttcccgtgtcgcgacgtgacgcgatcgtgttaaggcatctaaggcatttcaaccccctccatccttaatgccgaactccttcactctcaattatttccccttgatgtttgaataaggcaagtcagtttgaattagttcctaggttaaagtattttcccagttttggtatcaaaacgcgtgaaatcacacgatattgatcaatttcccaatatcagactactataatgatggaacgttggaacatcaaataggtcccttgattaacttttaaagaatgctcaaacagagggagatgcaaacagagggagatggacctaactcaggttatgttgtatgctcgaagtataggtcctgtcacgtcatgtgacctacaaggctgtataaacatatattgtccaaacatagaaactaccctttcctcaacctttcccttgaaacctaagcaacatttgctccattctaacgacatatgcaccttgcctctcaatcatacttttcaatttccacaaaatgccaactacaacagctctttctccttttacgtccgacctagagttaaagtcgtactgtgaagaccaagacttcctatgcaacggagagcccgagcctaacagtcgctcgcagactttgatctatcattttgaaaacaaaaagtggtggatcaaagtaactttcaaaggcgcgatttcttctttcccccaaaacaaaacaaaacgcgaacgacgaaaggaataccaagactttgtcaaattgttcgactttgatcccttggcccttctggatgatactgtgtctgaggtaatattgagcgaagacccgggaacaattgattctatcaatctgcgtcacgacctagaagataccagcaatcgggttataaggcttgttggaaacctatgattctatatccgggaggacccattgagagtgacttatccactatgcctccgatttccctctttccgcgctatcaatatcgcagaattgatagaagaggatgaaatcaccgacggagtattccgcgttttacataggagcgatagaactcctcacatcctcaaagtagtcaatcgccctctttatcaaccacgcgactcggatgtcattacaaaaggaactagagaatcttgaacatttcaaaggcgtgatagggattgtgcagtcagctggtattgcggcgtttaacaacccgtatgcgacctcccaaaatgtcgaacaaatggttatcggtggtattctattagaatactatagtggcggttccttacaacgtgttttaagtgaacagcgtataaggaaatttggttgggagcgatgggctatctaaattgtaaatactttaagcattattcaccgtgcaaagcaaacgcacatggatctcaaaccttcaaatatcggtctcgacgacgatggtaatgcggttatcattgatattagcggtatcggtggaataacgtacaactgacttgccccagagatacgcggtgaactgacacgtcttctgttcgaaactcgtcgattgaatgatatttgagcctacaggaagattttgaccgaaattgcgttaaacgcagggaacagtccgtttgcaagaactctgaagtgggttgcggatcatttaaccaaagatgttgacgcccggtggactctgtctgatggattgtctcatttgaaaattgctcaatgtattgattagttgatggaagtgagctgaagcctcccctctttcggttgctctgtagtaatgactacataaattgtctctagatacggggtactctgtttaaggatgtgagctaacagaatgaccaataaagaagagggaccggagcacctctccctctttatgttggcagtcagtgaattgctggattaaggattcgggtggccaaggcaggggctgcgtgatatacgatgtaaacaagttgatattagtgcgaacacatgttcatgtactgcaggttgccttctaaagggcaaagtcgatgactgcatgtggtagtcagatatatacaatagacctattggttcgatgtctctatgtgagactactaggtatacgatcttcatccccttctcttactgttatagactgttcaaaggatgtaattgggaatactacctcgtggccagggtggcggacacaatatttctatgtataattatcactcacaaacacagaaacctaccataattttacactagtgccatatggtaagccacattgtacataaaaaaggcaatcaatatacacggtctttcagctcttcagttcctcagctcactcttttgagaattgtaacatccaaggtctgatttcgcacatcaaagcaaatactgacttatgaaaagggaccgatatatcccaagtcatcttagtctgactaatgtcctgtagatactttccattatgacgagacagagaaatgctttccgatggatagttagcatcacttgtgaggatgcacttactccccactccatagttactcctgaggagcacagaggccctggatgtatatttaaatatgattccatgatatcgtaggccaatttcaaacatagctaggtagcttcaagatagtttggttcagtccatacagatctcggcgggattcaaggttgtttgtccttggaattcaggcacattgatttgctgactcatgaccccaggtcctgacaccgccctgaaggttctgccgcatccgcggaatttttttaatcttttttttcgaggaattagaccgcaatctgcaactgcacgattcggttttgccagtttaagaatggcaccaatcaagcgcaaggggaatgcccccgaagaaaatactgcccgccagccccaaaaacgtgctaaagttggagcggaggaggtcaacagagaccataagaagtcaaacgatgctaccacatccaccgctgggaaagcttcagaactttctgtgctgcgcgatgacgagccctcattccctcgtggtggcgcaagtgttctgacaccattggaacgcaagcaaattcagattcaggccaacagagatgtcttgttcgagcagaaagaatctggaaacaagaaaactgcccagaagacaccttccaacgaattcgccgaagaaagcgacaacgatgttgaaatggaggacgaagaaacaactgcgactacgaagaagtcgcgaaagaagaagtcaaaaagcaagaagtccgcagacaaggaagctgatgacaagcaaaatgttcgcatcgagggtcttagcttcaaggtacgtgctagaaaactctttcatgtcgcatcactctaacaattatagcgcattgtacccggagccatgatcctgggccaggtctcgagtatcaacgcacacgacatcggtctttcgctccccaacaaccttaccggttacgtccctctcacatccgtttcgaagggcctcgaagacagacttgagaagatgttgaacgatgaagctgggaatgacgatgccgaggacagctccgacgaggagtcctttgacttgaaggatcatttctatttgggtcaatacctgcgagcattcgttgtgtctactggcagcaacccggatgatccaaaggcaaagggcaaaaggcgaatcgagctttcagttgaccctagacaaacaaacaacggcttctcaaagtctgatcttgttgtgaactcagctgtccaagcgtccgttgtcagtgtggaagatcacggtgtggtcatggatctgggcatcgaaggctcagaactgaagggctttatgtcctccaaggagaccgatcccagtgtggattattctagcatcaaggaaggctctgttttcctttgcatggtcactggtcagaatcccagtggcaatgtcatcaagctgtcctccaacttccaaacgtctgcctcgatcaagaagtccaactacctcaattcggcacctacaatcaacactttcctccccggtaccgctgcggaaattcttcttacggaagtcacatcgaacggaatgattggaaagattatgggaatgctcgacgcaaccgttgatttggtccagtctagcatcaacggcaagattgatctggagaagaaattcaagattggtgcaaagatcaagggccgtattattgcgactttcccggctgccgagccgctcaaagtcagcttttctatgctcgaccacgtcctcaagctctcttccgatgctcgcggtcccggttcttctgatgatgcgcctgctatttccgcaatcattcctgaggtcaagatcgtaaaggttgatcaaggtctgggtgtgtatgctcggattggagaaacaaaacatatgggcttcgttcacatgtcgagactctctgatggcaaggttgaaacagtcgacgaaagttctggacctttccagctagacgctgttcacgaggcaagagtcattgggtacaactctattgataacctctacattctctcatttgagaagagcgttatcgaacagcccttccttcgcgtcgaagatgtgaacgtgggtgctattgttaaaggaaaggtcgagaagcttctgatcggtgccgatggtatgactggattgattgttaacctggctgacggaatcaccggtcttgttccttccatgcactttgcggataccatgcttcagttcccagagaagaagttccgcgaggggcagaagctttccctgaggatcctctctgtgaacctcgaaaaacgtcaaattcggttgaccctaaagaagagcttgctcaacagcgagtctgctatctggaaagactacaaagatatcactccttcggctcagtcccctggtaccattgtcaatcttcagagtcatggtgctgttgtgcagttctacggcgaggtccgtggtttccttcccgtatctgagatgagtgaagcatacatccaggatccggcccagcatttcaaactcggccaggttgtcaatgttcatgctttgagcgtggatgcagcccttggaagacttgctgtctcgtgcaaggatccctcgacattcaccgaaaagtatcgtgaggcctttgagaaccttcatcccggccatcttgttactggaatcgtctttgagaagtccaatgatgatgtgcttctcaagcttgacgagtccggcctcgttgctcgtctcgacgcttcacaactcatcgacggtcccccatcgaagcaaagctcgatgttatccaagctccgcgtcggacagaagctgaatgatcttttggtcctcagcatccagcgcgctcaccgtcttatcaaggtttctagcagggccagcttgaaaaaagctgccaagcagaagaacatcccgggccatttcgaggaagtccaagagggctcccttgtcacaggattcgtccgcaacatcacacccgacggtgtcttcgttgaattcctcggcggtctcactggcttgctccccaagcgtcttatcgaagactccaacctcgaacaacctcactacgggttggcaaaggcgcaaacgattgttgtcaatgtgcagtctgtggaccaggaattcaagcgctttatcctgagtatgaagcccgttgaggctacccaggccgctcccaagaaagcggccaagcagactgacgagagcgttgccaaccccgtcgatgctaacatcaagagcatgtctgatttcacatttggcagaatcgttgagtgcaaggtcgtctctatcaaggcaacccaagtcaatgttcagcttgcggataacattcacggccgcattgatgtgtccgagatattcgacgactggaaagacatcaaggatcgcaaacagcccttgcgattctttaaggccaagcagactctctctgccagaatccttggtgttcacgatgctcgtaatcataaattcctccccattagccaccgcactggaaagtaccctgtgttcgagctctctctcaagccaagctacatcaaggccgccaaccctgcccctcttaacatggagcaggttcaagtcggctcctcttggataggcttcgtcaacaatgtcgctgatgattgcctctggattaacctgtcccccaatgtccgcggcagactgcgcttcatggatgcatcagacgacctctccttgttgactgatatggagaaaaacttccccatcggctctgctttgaaggtccaggttaccgctgttgacgctgagaagggccaccttagtctatctgccaagcaaggatacgacaagctcacatttggagatatctccgttggcatgatcttgcccggtcgcgttaccaaggtcactgagcgccaactcattatgcagcttggcgagtcacttgtcggtgcggtcaatctgattgacctcgcagatgactactccaaggccaaccctaccgtgcacaacaagaacgaggttctccgagcatgcgttatcgccgttgacaagtctaacaagaaaattaccttgtcgctgcgcccctccaaggtcatgagctcctctctgcccgtgcaagaccgtgagatctcttcgctcaaggatgttaagcctaacgatgtcattcgcggcttcgtccgacgagtcaccgattctggtctcttcgtggcagtcagtcacgatatcactgctttcgtccgtgtctctgatctttccgattcgtatctcaaggaatggaaggactccttccagccagatcaactcgtcaagggtaaggtcacgtttgttgacgccgagcaaggcaagctgcagttgagcttgaaggagtctgttctggaccccaactttaaggctcttatcacccttaaggatcttaaagttggtcagattgtcacgggcaaggtccgcaaggtggaggagttcggtgctttcattgtcgttgacgggtcttcaaacatcagcggtctttgtcaccgtagtgagatggccgagaagcgcgttgaagatgctcgcaaattgtacgacgaaggcgatgctgttaaggcgaagatcattaatatcgaccttgagtcgaagaagatctctttctcactgaaggcttcccacttccaggatgaagaggaagatgacagcgaggatgaggacagtatgagcattgacggtcttggcggtgtcgaacttacgaaggacgacagcgaagatgaggatgatgatgagtccatgggaggtgttgatgtagaggatgacagcgaggaggaggaatcagaggaggaggatggagatgtcccgatacagaagcctagcaaggccggaggtctcggtgcgagcggcttcgactggagcggcaccgccaagtccgatgctgccgcgcgctccgacagcgaagacgagggttccaaaaagaagaagaagaagaaccgcaaggccgagatccaggtggaccgcaccggcgatttggacgccaatggccctcagtctgttgccgacttcgagcgactcctcctgggtgagcccgactcctcgcttctgtggctgcagtacatggccttccagctggagctgggtgagatcgagaaggcacgcgccattgctgagcgtgctttgcgcactatcaccatgggccaggatgctgagaagctgaacatctgggttgcgctgctgaacatggagaacacatacggtgatgatgacagtctcgaggaggtcttcaagcgtgcctgccagtacaacgagccccaagagatctacgagcggatgatcagtatttacatccaatccggcaagaaccaggtatgtatccattttgaatcttacttcctacggatgttaacaattttacagaaagcaagtgatctcttctacgcggctctcaagaagaagatttcctcccagtcccccaagttcttctacaactacgccagcttcctcttcgacaccatggcctcccccgaccgtgctcgggctttgctcccacgcgcccttcagtccctccctgcccacacccacgttgagacgacctccaagttcgcccagctcgagttccgctcccccaatggagacattgagcgcggtcgtaccgtcttcgagggtctcctgtcctcattccccaagcgtattgatttgtggaacgtcctcctggacctggagatcaaggtcggcgatgcggagcaagtgcgccgtctcttcgagcgcgtccttggcctacagagtggcaagaagggccctgtcagtgtggacgctagcaagaagctcaagcctaagcaggcccgattcctgttcaagaaatggctttccttcgaggagggtctggcagctgccaatggagatgagaagatggttgaagaggttaaggcacgggctgttacctatgtcaagtctcttcaggagtaactctataaaaaagtgtgttcatctgaacctgccggtgtttggggcctgtgaatttcaatcttcaatgtttttacctgtatatagatagcgatggaaatattcaatcaatcgtcaacaatccagcacgtgtatacctcaggacatggtcgtagctttgaaagtaccacggatccaatcaccgccctcaatatcatggctgcctccagttttaagggtcggggaatctatttttgtgttttcccttctgtcttctctttacttcctcacccatgatgagccctttccgccctccccagaccaattcggtatccagtcttcatttcgatccatacagagactcactagatacggaatacccgaaggtcaatgtacatgttgactctgttgactctgagcgagtggggtatccggcccgctcatggcggcaagtctggacagccttggcttggccttcaacgtcttccatgctgtcggaaaacccagctaagcgcaagcgatcttgtcgatcgcgatacttacatggtctccggcgtgcgattatcggaatattcattatgctgtgagtttcacgaactgtgcaggccgtgtctatgcggaagaccccgctgacctatcgccgataacagaggcatcatccaatttatctccatcgcttgtggtatcgccctctcattcttcccagatgagtacgaccgtgcagttcataattggctacccagtaccgacggtacgaacacaatagacagcacgcgctggcccaccgatatttcgcgcgatatcgtccctgttggctgtcactcccacaacgattactggcgccgggtgccactgtactccgcactgcaggcgggatgcataggcgtcgaagccgatgtctggctcttcgacgatgagctctacgtcggccacaccacatcgtccctgacagagcgcctaaccctacaatctatgtacattgacccgctagtatctatcctcgagcgccagaacccaaccactagatttcaccggggaggccacagccatacacatggtgtcttcggtacagaccctgcccaatcgctcattcttctaatcgacttcaaaaccgcaggcgcggcaacctggcacgctgtcatgaagcagctcgctccgctccgtgaccgcggctacctaacccacttcaacggcgacgagctcatccaaggccccatcaccgtcgtcggaacggggaatacacccttcaacctcgtcaccgaaaacaccacctatcgcgatatcttcttcgacgccccgctcgataaactcgtcggcacggaccagccagacagcagcatcccagacgcagccctcttcccgcgcacagatcttggcacagatcttggccaaggccaatctggtatgccggctgtaatcaccgcgtccaccttcaacacttcgaacagcttctatgcctctgtgtctttcaaaaaggcaatcggctacccatggcccttccacttcacgcagcgccagatggacctcatccgcagccaagtgcgcattgcacaccaacatggcctgaaagtgcgctactgggcgttgccgagctggcctcgcagtctgcggaatcatatctggcgcgtgcttgcgcaggagggtgtagatattctgaatgttgatgatttggttgatgccacgaagggggtttggaatacgagggtcttcgactggtggccgtgatggctatgcattgctatatattgggtatctttcttcttgttttcttttcgcttttacttatgatgaaatatgggatttgatgaaatatgggatcatgggctggattgcctggcgttaagggtttcttatctgatttacgataccttaccttttctttggctgtgttgctttattttgtttgatagaccacttgcttcatatctatacatccaatatcgaaatgtatacgcagctttcgggatactgtactgatactgatgctgtaactaatctggcaagagacggaaaagacaacagtgccctggtgaaaacaacgcttcggttcaaattcgtcacaatcataatttcggtctctgttgcacccagtgcaggagcagtaatgctatactccgatctggaatgtgttccccaatgcccttgattgtcgatctccacttgacgccataatttatgcagtaaaatcaggtgaaaatggcatacattcaccaaagaccatgtagtggctctcgaccagcgacagcccccctaacaccgataaaccacaccaaacgtagctatccgcgggatgtcatatctcataaacagcagagcgcctcttcaccgaactcgcggataacactaccctcttcccgaatcaggccaccaagccagtgcttcgcagtctcaaaatccttggcaccgaacttgacaagcacaaagccagcgcgcacccgcgccgccgtccatgtgacattgcccttaaagctcagcgaaggctcaggcaccgacgacggtgcatggtccgaccaattgcgactaccaatgcgcggctgcgactggaattgtttcaacatgaacgaaccgagcgcttcgaatacaggaccggagagtataagcgtgccgacgacgccgtgtgggcgcgtgcgctccgcgatgatattcagcggggttaagccgactggcgcctgcggtggcagatcgacggggttttctagaccggcatgggtggtggtgctgtaggttttatctttcttttcgacttcgagtccgtcgggtatggatgtgtcttgtaggtcctcggattcatcgtcgagaattaccgagtcgcggaggagtagtcggcgtttgcccttgtcgtcttcggcccagacttcgttgcgtccgcgccagaagtggaagtcccagtcctcgccgcgcgaggtccggccttgcgttacccaatctaggacgcagaggctgctacgctcggcgccttttgcggtggcgtctacggtgaaggtttgaacttgagcgtagcggctgtgtttgaaggggacggaagggtctgggaggtagcagagggctgcttggcggccaatgttgacgtcgagtgtttgctggctcatgtcggagagagatttgtttgcgggcatttgatcgcggtggcctttgattacatttggggatgtgccgttgttatttggggttgttttgaagatcttggtgctgccttgtggcgttgttaccaccattcgtgtcctgggttcgagcgtaatggacacttcgatgtggtcacctggcaggagcccgccgccataggtgaggaggtataggtggacggggttggagggacatgtgtctgagagggcagaagaatctggggatgggacgaagccgccggtgcgcgggactagcttcaatggatatttgtaggtgagggttgtgagggtgggattgttcggtgggaggagggagaggacgaccttgccctgccctggcttcgcaatggaagactgaaagggcgagggaatgggcattgctggttttcgcatggtgatggatgtgataggttgagaaggcggagagacaagaagtgtagctagtaggtttataggcagaaatagaaaaagctatattgagcaatgaagccaggccatgctatcacagatcagaggggacgagttggtataaaaacaaaaccctggggaaatgacgattccttagtcataggcatccacttgtcaagcgggggatattcccaaatgacctctccttggctccctgatgaggatgccggagcaaaactaggacataaaataactggcagagaatgaatggttgaggtttctatgacaaagagtatctccctagacctggagggttacctcttggcaatgtacttttatgtcaattgcccaggtgatctgcacgacttgtttaactattatagcctggcagtctgggcattgaaaagaggtcatgagatacagtgtagctatggtaaatcagccatatgctttctattatattagggggtcaattttgtgatgcaattgtcgatgagaattgctatacacacacccctaaaactagctacacactcacttaaactacttcggctagggcctatcccagggagggctcatggctattctcatttctggacggaaccgaatgttcctggctagagactaagatcgagtttgaacaaggcgttgacagcgctaaaccccgcagctagggagaagaacgtttagttgactagtgaactatacagaatagacacctgatatacaagacatcaaacccctacgtagttacgtaatctaggcaccctcaggccccaaggcacgatgtcgcgtctccccccacgctgagatccggaccgttttctgcccaagtacttccgtttgattgaccttgtctcaacacggtcagagcgcgtgtcgcaaatacttgacgtctcgaattgcagacttctttcatatcttgcgccaacttctgtttgctgtaccagacctgcgcgttgcacgagcgcgcgtcccgacctgatctgtagcgacatctgccaactctgttcaaagccattgatctgctcagcagacccatctatccgatcgcatacccgtataatacactcatccgatatcatggatatcgataacccacctctatcaagccccggtggcccgtcatcgacccccgccgaagaccgacgcaaatccggtcggcagacgcgacggcccgaagtattttcgcagactacacactctgccgacgaacaagctgccggtgggaagcgcaaacggggcgaggcgcgcgaggacggcgatgaggacgcgtccgagtccgacagtgatgatattgacgacgagaccgatgaggaagaactgaaagagaagcgacgcgctgcacgccgagctagcgcgaagaaatccaaatccaaacccaagaccaagggatcgcacgcttcaaagaaacccaaggttgcaagtaacgggttagggagacagctcgccttccgaccagccaccaatggccgactgcctgctgctcgttctcggaaaccgaaagtacgaccgagtctcgcggcgggtgaacgcggattgttcggtgagtcataattatttgtgtatgcaatatcaatggctaataccagagttagccgaggtatttgggaaaggtagcaatgccgatacagtggccgctcagtggttatctcaataccagcgcgacaatgggcaggccatgcgggacctcgtcaacttcatcctacgatgcacgggtaccgatcttgagatcgacaataatgaggtggaagacattgataatgccccgggccgaatcgaagacttgcagaacctttaccaagcagaaggcatcaccgaataccctatcatctccaaagcgaagaagttcagagcgttctcggttctcctcgaggaattcactatggcactgatccaaaccttccatgcctcttccatcttgtacaccgatgacaccctgctcgagaatattcagatctggatctcttccatgtcaacatcaaaatgccgaccattccggcatacggcgacattaatctccctttcaatcatgaacgcattatgtgatattgcgcgagaggtgacgacaaccgtatctacatccaggaaacaacttgaaagtgagaagaaaaagaagacggtaaacaagggtcgcgtggaagcaattcaaagggctgtttcagagggcgaacagaaggtggagcgcttagacgagttcctacaggatgggttcgatactgtatttgtccatcgctaccgggatattgacggtcagatccgtgccgagtgtctgacagctctaggcggatggattcgcacataccgagaaatcttctttgagggccagtatttacgatacctagggtggaccctcgccgatgtcattgcgcagaccagactcgttgccttaaccgagcttttaagcctttatgagaaccgtgacaaccttgctggtttgcactcattcactgagcggtttcggcaacggattgtggagatggctattcaagatgctgatgtttcggtgcgtgtggctgcgattgagttacttaaccaccttcgcgaagccggcttactcgagccaaatgatattgatgctgtcggtcgactggtgtttgatttggacacccgaattcggaaaacagctggacgcttttttgttgccaacgttcaagatgcatacgagtcaatcaccgatgaagtgggagaggagatcgccgaattgctggctgacgacgacgaagacgactatgagtcgcctaagcactcctggatcaagtttaaatgcctcgccgagctgtttcaggcctacgacgaccaacaagccgaacagcaaccagagccattgtctcgcgacacactgctaggtgcggccgtagagtcgcgctttgctctcgcgactgaggctgtctatccctacctggaagaactgtctcagtggccatcgctggctggttatctgctttatgaccactctcaaatcaccgatgcgccatctgaagatgataccgcaggagccgtaaagaaaatgtacagaatggaagagggacaagaatctattcttctggaagtactctgtgccgcagtcaaactccgtgttctcgacatcgccaagtctgataccgacaagcgtgggcgcaagacgaaggctctagaggccaagatttccgagctccaggaggaactttctcacaaccttgcgcagatcatccctgggcttctcaataagtttggatccacaccggaagctgcttctgtcgttctgcgactagaacaccttgtggacctgaacacaatccaggatctccaaaaagacgctacggcttatacctcgctgctcagcgatatcaacaagcagtttttgactcattcggatcaagatgttctggccgaagctagtgtggctttcttgcatgccaagagctccgaggagatgcgagaggcgctagagagcaaggttcaagagctgtgggatgatatggtagaggcactggctgccttgtctcggaagaaggaggtccaggaaggtggctcaatatctgatcccactctcaccaacctgaccaacactgtctctcgaatttcgaacctcgccggtatcaccgattgtgcctccattctcgaaactgtccctaattcaagatcgcaatccaagaaagaccacaatgaagccccattcaacaccctcattcatcttgccgaacgtggtctgcgcatcgaagatgacgatgaggataccgctaaggcagagaacgaactggtctcaagcagtatccggtcgttgcttttctatttcatgtggaaggtgcaggcactgtccacagccttgaacgatggaaaggcctccttcagcacatcctacttcgaagcactgacaaagagccgcgaaacgttcgctatattgctcgtcaacatcatggaaacgcgccctgggctggatgaccttcgcttcacagcaactacaacatacctagacctacagacgctcttcagcactctccggaacatcggccaagccaacggcaatgacgaagacgtcctgtttcaaacacaaggcctagtccatgaaatcgaacccgacacccaagccctcatcaccaagatccacggaatagctgagcgcacatccgccaagaaatcaaggctcaatatcgagcccgcagacgacgacgccccagcctcggaagacgagctcgactccgaagatgaagccagcgactccgaagacgaagtagtcatcaacgaccgcctccgcagtagcattgtagccgaacagcgcctctgcgagctaacaggcaagctcgtcctcgccatcatcgcccgcatcatcgacgcctccggctctaagcgcggcgccctgaagaagcgtctccttcgtcataagaccgccctcggccacaattaccgagaggtcctatcttatttggaagagcgtaagccccgcagtacgccccgcgccaaggggaaaaagcctgccaagtctgctgcttctcctgccaagggcttcaagtctgctgagcatattgatgatgacgatgagcacgaccatcctgagcctgttgaggaagatgtagatgaggacctgcgtgcgcgcggacttgtcgaggatgatgttgaacatgagaatgggcacgaggacgaggaacttggtcccacgcctgaggccgatgaggatgaggtgatgggtgactgatctggtctgtcttatttgacgttaatgtgtgcctgaacaaaatgatatttcttcgctgtcgttcattgcttgttacttttttttcttgttacttttttttcgctctctctactttcttctctctctcttttatggattatggctgaattgactgtacctctcttctttgctctcgtttgcgtggatatggagttattttcaacctgtatcttatacacttcccctgatctttactttgctgctactttgctgacttgatctcaatctattcccctctggtctctgctattttttgaaatcttgatatggaattgtggtatagtaaaatggatgtaactaagtctgttgctatcattggtacatttagactctgattgtacattattttcactgcctgagggcttcgtattctaacattgaaggcttgcaagtctagcatcagttcgtctcctcccgagaacataaaatacgaagataagttgtctggggaagataggaatatcctgggatacaattacgactacaggaagaaaaggtaggtcaagtgaaatctggcattttttcctggcgaattgcaaagcgtaccacgagaatagtgcaataacattttcagaggcatgattcgagcagattatgagcgtggtacgagcaagatgtgctgccacagccctgttgtcagcaagcgaggacgtgcccgcgcaggagaccaatgccccgtcaaggaacaccatagtcagaggacattaacgtaactggagagagaaaaccgatcctgcaaacaaatgcgcctgtgtatgaggatgctaaaggggtgggggaggggatacatgatggtgaatcttgtttatcgtgaaatcaaaaaaaaaaaaaaaaagaggggggnnnnnnnnnnnnnnnnnnnnnnnnnnnnnnnnnnnnnnnnnnnnnnnnnnnnnnnnnnnnnnnnnnnnnnnnnnnnnnnnnnnnnnnnnnnnnnnnnnnnnnnnnnnnnnnnnnnnnnnnnnnnnnnnnnnnnnnnnnnnnnnnnnnnnnnnnnnnnnnnnnnnnnnnnnnnnnnnnnnnnnnnnnnnnnnnnnnnnnnnnnnnnnnnnnnnnnnnnnnnnnnnnnnnnnnnnnnnnnnnnnnnnnnnnntgaaatgcgtgacaagagaagatgagggaatcaaatgagcaccataaactgtttagacgcaacgccagaccgagaagtagcttggtcgaagcgcacgagaggcgtcgaggctgtatgcgagcaacctggcctctcggtagccagtggtgcccgacccatgcgaggatacgctggacgcagcttcgacgtttgggtttgaaagaagatgaagatacaaggattggcatagtgcacgaggaaaagacaagtctttacatatccatggtatcaccgccgttgccgaagttgaagccaccaggttgctgctggccagtgccgagagcaaatccagtctgggtctgttggggagcaagttcctcgatatcgccaccggcctcatcctcgtcagagaagtacttctcgataatgttgtaggccttcatgtagatctcctcgttggcgttgttctggcaatcgtgaatcttctccatgccaccggcctcttcgatgaagagagcgtagcggttgacacgagcctcaccgggctggccagcctccttgtccatatctccgaccttgaggatgttctcgagaccgtcgagagcgacctggatgatcttattgtcagggcaggccaggagatcgcacaggggtttgatgcagccttgagaaacaaggtagcggatctgatcgggcttctggagaccaccggaagtagcgttagagatagcccagcaagcctccttgcgggtcttgaagtcaccattggcaagaaggttgataaggggagcaatgatgccagcgtcgatgaccgcctgaatctggctggagttaccggcagtgacgttggagatggtccagcaagcttccttgcggataccatccttggtggagctcaggagggagagcagagcaggaagagagccacagttaatgatcacctgggtctggacgtcatcaccagtgacaatgttacccacggaacggagagcgggagtctggacagaggtagaggcgtgcataaggagctccaccaggcgacgggggataccggcctcgataacggcctgaatcttgtcgttggcaccatcggacaagtaagagatagcccagcaagcgtcaatcaggacctcgtcatccagcatgtagatgagcttggcaaggactggaagggcgggggcaatagtgttccagtcaggctggggagtcttgccacggcagaagttgctaagagtccaagtagcgttgcggagcatgctcagcttgcggccatcgttgatgaggttaagaagcgggcgcagggcaccggcaccgaggacaaagtcacggcagtgagggctgtcaccagcaatgtttccgagggcccaaacggcctgttcacgaacatcgggctcagggctgctaagcaactcgacgaagatggggacggcaccagcttcaatgacgacctgggtctgctgggcggaaccggaagcaatgttggtcaaagcccaggcagactcaaactgaaccagggtgtggggtgagcgaaggaactcgacgaaacgggctacgacaccggtctcaataacacgctcgataggggggttgcgctccttggaaagcaatttgcggaacttggtggtggcctggatctgttcctcaacctgatctgagaaaactcccttcaccatctggggaagctcgacgttgagctgaataaatcattatgttagcttggtaattttcacgatgttttttttttattgcagtggggtcaagtcagaggggtcttcgtgggccatggcaacagggcggtgaaaaaaaatccttgttgatgatcgcatcatgaaaacaaagaattcactcagggcccataaaggtggtgaccacaccatgagcccgtagaaatccaaaggaggatatagaatagaacagatttcaaaggatcaaagaaaaattgaaagacctacctcactctcaatagcactggcctcatcatcactctcagtggcggcagccatgccaccaacaccgattctaccgtcctgagtttggataccacgtctcttggctaagttctcatcacgcttagccttgcgaatctcgacctgctgttcttcacggcggcggcggagctcatcgggcttgaactggttcttggccttgaactgtgtgcggcgatgctcgggaatatagcgttccgccatgatgaaaatggaaacaggaaaaactaagcgcgccgcggtgatcgattatgtagtatgtgaggttgagtgggcgcgcggggagatggacggagagtaggaagaaggaagagggatctgatgtgggggaagaagacttctgtgggaggggaaacgatgctatcacgtgattactcattcgacgtactcccacgacaataagctcgtcctccctgagctcttagaattccacttattttggtgcttatttatgacaattgctctagttatgacggatgtgcattgacagaaacgtgcatttttttctgagctagtttgtgatatctcaccgggagcttgcaggacatcccatcgacaaaagatatggcttcaggtgatctagtggacattaccactgcttgctcttcacaagggactttcaatgtcataggtgtggtaattgacaagctaccactctttcggaccagaggctcgtcggcatgcatcaccttcacgataaaagactccaattttgatgcaccaggctggcaaggtggtcttaaagtcagatatttcaatgatgatgagagttttcttcctaatgtcgagctcaaagatgtaatcctattacgaaacctcctggtgagtttatttacatgagtgcagcagcatggtaagctgacaggattcaggtgcaaatttaccagaacaaaccaacagggtttgtttctcagagatcccatgtgtcatgggctattttccgaccagagccaagctcgagttccagtccgttcattaccagcggtcccattcctttcgagccgagtctgaaggaaaaggatcaggcacactcgctcctggatagtgtatttgccgaagcaatccctgtgcaacaacccaccccgcacagtatacccgcctttcagcagtcttctcatgttcaggcttccgttccagccgcaaaatctggaggcctaccgtatatccctattcagtttgcgacggttcgccaactttgccagttacttggccaagttgtgaacctcaagacttatgacagtgaaaaatgtatgctggacttgactgatttcactgagaatgaggggcttgccaactacaaaaaacccggagaaggtgacgatgaatcaggtcctgagggcgaccgatttaattacatacagaagacaaagaactggtcaggcccatggggtaaatttaccatccgagtgactttatgggagccgcatgccagctatgctcgagaacacctcaagccaggtgacatcgttctattaacctatgtccatatcaaggaacgccgtggtggattggaagctgtcgttcatgaagacaaactattcccggagaagattcatgtcaggaagatgaatggtagcaatgatgagcgtgtacgagaattgatgaaccgccggacagaatactggaagatccacggtgaacccaaggcagataccaaaaaggccaagaaaaagaacaagagagtcgagcagaaaagggaggcccggaaagaagaaggccaactgaccatgccagcagcatcacgaatcaagttgaatcaacatggtgagttgattgtgttcctaagagaagcatattggctgataaatgtttagtcaaaacaaaaaattacacagtgcctactttccctctggagaagatcttattggcggagactcatacaaacaatgctccggggggcattgtctataagcttcccttccaaaacgtcaattatcactctcaggtccgggtagttgactttttccccccaaagatagaagactttacggttcaaacgaccaacgctcccttgttcggcaatcaggaaagtgccacggagtctcaacttggctgggaatggcggttttgccttcttgtggagggggttgagcccaaacctcccaaacaacagccccgaggaatgatgaagctctatgtgtgcgggcaagatggtgattttcttcttgacgattatgcattcaacctccgcgacaatccacggagactggaagcgataaaagagaagcttttcctcttatggggcaatctcgaggaggagaagtcgaaagccatagcttctggtcaacagagttgggggccagtgaagtcgtgcccattcgagtgctgcatcaaggaatatggtgttcactgcacccatgccaaagaccccaatgtgatggatgtcgacggcgaggtgtgcacctatcctgattgttttggatgggagagacgatttgccatgttcggcacgactatccacacatgaattctacaatccccaggtcttgtggaaaaaaaatgtatccctaaataaagcttgtatggattgatcctttgtactaatacaatttaacatttttaatcaatagatggttgcgcctggaacctttttttttcacccgcatagaaaggaagaaaaaaacaacgttgaattctcaatgcctgtatagcaagcctgctcccatgcaccgtccataactcccgaatgatcgaaattctgataatgtcatggatgcttcttttgaaccttttccccgtgaaactcacactgaactcaatagacaatattttaggaccttgtttcaagaaaggttcagatcggctgagatgagcataagattgcgagatggccgctcaaattttcgtaactttgacgatgttcgtgtcgatgccatgcgccacgggctcaaagcggcagctgtcgcctcggaagcaagtctttttaccaggttcgctctgaggacaacgatgaccatagatacactcgacgtcatcacattctagaccaaagcgacaaggtgtcatgcgggcaatggctgacaagatgtgcagatcttggcgtgacaatttgcgatcatggtcatgatagcaattctcttcattaggacattcaccgagcaagaaatgataattgcaaagcttgagcttcttcagtttgttaagatcatcgcgaggaatgctcttgaagtcgagccgatcaacacgctggccatatttattccgttccacggtctttgggggggatgcaccaggcaccttggaccgaacgacctggaaatcagaagactcgggtttatttgtcatcgaggccaatggagcacccaaatttgacacactggtactggtagaggttcgtgacaaagcaggtgtttggaattgctgggtcggcgatggtgtgagcaaagtccgcgaagggattgcgcttttccaaggagcagcccaagacggtgcactcgttgcactcggtacactcggtgcggtcaatgtaattggagcaatctttgtggtgcggaaaacatccgggaactgggtgatgcgatagtcctgctctcggaaataatcaaattccttctcgagtggaagaccctcaaccagcgagactcggcccttataattcgcgccagaaatgagttctgtcaatgaccgagcatattcttcattggagggacagcccaagaagagctggtggcaatggcagttgtataagtaaagcttaaaagcctctggaggaagagaatcagcaatggtatctttatgtcaggttgtaccacatacccttgattttatcgtgcgctttgtttttgccagttccaacgtccacaatttcgaagaacgatgcactctcattgaatccacgaataaactcattgattgtggaggcctctagggcgattccgccccggatgtaagtctccgtaagtcccttcacattaagatagatcttggtcattatcttcggctcggtgatcgtggaaagaattgttgtaacgtagctctggagagatttccagagctgcttggccgcattgcgtccaccctgttcccctagttgcagaaattcatctttgaatattattccttcgccgtctaaaagcaacacgacgaatggttcacggtcctagaaggaaacaaaatatgtgtcagcctgagcttagacaaggcgtccacagctgtgctcaccatcattttcttgacaactgatatctggtccatcagctccatttcatgcacctgaacctcacgattgaaccgggtttcgcgttcatggtcgagtttctcttgttgaaaggaattctctagggtggtcacacgttgaagaagttcctatcgcgagtcttgttagagtgaataggggaccaatggaggaattggttggtacctcaatgaagtcattcttctgctggtccagagcgcttagctgacgatagcgctctaaataagcttgagtcgccatttttgtagattgatgagtatcgtttgcagatctggaaatggttggaattgcgaaaaggatgaatgcgacaaaagataaggaagaaagtaaaggaagggagagaagcaagtttcaagtctgatcaaagccaacagggaaattccagtgggcaggcgcttgcaggaggtgacaatctacaaagcgcgtaaagtgttagaatcagcggtaatcaccaattatcagtggccacctcactttattaaattaattgatatagagagagaaatttatagtccgtcgtctttgcttcaaataaaaaatcaatctaagaccgcgggtgccatctggctgagtcagcccccggttttgcatacgtggagccaaatattccccttcacctgatcttgactttgacctttcccctgtttatctcttctctttctctttcttttctctcttccggtttcaagatgactcgctttggtttcctctctttggctctactctctctccaggccttcattggcaccggctttgctgctgtatgtgtttcgtcttgatttgcttcgggaaccatgtcgcatgactcaattgactaattgtttggggttgaactttcaggatactgagaatgctgaagcagaggctcccactctggctgtctcagcacacgcctctttccctgcttccgagatcttcggtatcaagcttgtcaacggtcaccctacccaggcgctgatcgccatctccaacgatgagccgaatcctatcacggtgaactttgtcgggggtagccttcgaaacgctgaagaccaggcgcaagttgtccgcaacttgactgctactcgttatgccattgagattcccgctggcgagaaggagacaatcagctacagcttcgccactgagatgcacccccaggatctccagatgacactttctgccatcatttcagacagtgagggccgcttggttcctatcgttgcccacaatggcaccgttagcatcgtggaggcggataccagcatcttcgacccccagatgtaggacacccccctttacccttggtgtgagagcaacgaggctaacaattacaatcagcattttcctttatttcttcctactggcctgtgtctctggcactggttacttcttctataccgtttgggtcgctccctacttcccccagaagcgcaagtccgcaaagaccagcgagaagcgcacacagggtggctcaaagcgcgctgagaccccagtcacggaggagacttccaccggcgctgcagtttcttctaccagcgcctacaatgctgattggattccctctcaccacatcaaccgccccgaggcccgcaaagtcaagggtcgctcgaaggcccgtgcgtgaatatactcacgacagtcatatcacgaatggaggaaggaaacaatccttttcaatgtgtaccattgtcgggggttttgtctagtgtgagggcggcattagccacggtgctggaaatgcaccctgctgcttgtcacaaaggacatgtatatctaccaaatagaagattttggcccagtttagcttccacggacgccaaacaggatcacttttggagagttcaatccattgtataccacgctgtgcctgttttggcagtactggtatctcacagtttcttccattctttaaattccccctccagatgttgcttcaattccgcaaaccgattcccaaaccccctaccacagcgccagcaagcaaagtctcgttttaggtactcctcttccgtcggattccgtcgcacatcatcttccgccagcgggaagtcctcgattggcacgaagaatggtgtcgaaaagctattgtagtgtttccggtgcttcaagcgctcgctatacctatccaccgataatacatggacatgcaagtggttcatagatggaactgcatgcaccccaaccataatctcctgttcccagtcccgaccccgcggtagctcgtcgggcggcggatcggcgctcagtgccgtctgtctcgcctgctcctgcgcagagtccttcccatatttgcgtcgcagctcgctcgctgccagcttgcgaagtgttcgagtttcggccctcacttttgctaggaagtcggcatcctcaaatgcatcaaatgggtgcattcgtgttttggtctggtcgcgggggagaaggaggaggtgcaacgatgactttgggaacatgtcgtggatcgccacaaaatcgtcattgtggtagaccacgacatcgggagcatatttctcaggctttgtgatgtaggtgcctagtccatcgcgaacaccaaatgcagtcctgcccttggccgcattgcgatcagacggggttttagtcgcgtgtttggattgcttgcttttaggagccaggagttcggtaactgtcaaaccgatatgtcagtcaagtatttttcagtggtacgtctctcggtctttacaggcattcctcttttctgacgtcccagtttgcttctttgggtcagctttggtcggattggagtggtccccggacatggttggtgtggaagtttgactcgtggtcacacaatatatgttagctacagcattgcctttgagcaacaaatccaaatctcacatcggtagaccgagtagtaagagtacaagacatgtgttgggagttaagtctcccatggtcgctgcgctcttccgtatgctccccgcaatcccaaagcggtttagtgcgggtcgctcttttgcttgaagctccaaaaattatctttcgcgcaaacactcaccacgcacaaaatgccacctaagaagaaaggcgatggtaaaggtggccccaagccgggtacaaaacaagccaaagctgtggcagagaaagcggccggcgaagtgaagaagcaagtgccggaggagcccaagaaaccatccgtgaaggatgtcattggcggcgcatcatggacagggaagctaccggtcaatatgttggcagagcactgtcaaaagcaaaagtgggaaaaacctgagtacaacatggtaatcaacttcccatggcactcgtcgcctgtttacaaacacatatatcaaaccagatgctgataggttgcgacaattgcagatcaaaactgccgacggctttgtatcatccgtcacaatgaagaaaatagatcccaagaccaaggaattaatcgtgatcccaccgataaagctccctccctcccataagcaacttgctgggcagccgacagccctcgaagcgcgccatttcgctgcagcgtttgctctgttccgagtgtgcaatatgcgcaatattcatatgatgatgcctccaacttataagaaattgtggaaggaggactttggagaaattaaagcagcagaaactcgggaaggcaagggctggatgtacgaggcagatccattcttagccaagcaagagagagagagcgcggccgccgatttggcaaagaagcgagcggatcgtgaaagagcccaggcaaaggagaaggcctcaaatgcggaattaggactaggaaatggggatgccaggagtaaacgtatctggtcacaagcgcccaaggtggatatgggcacacggattcgacgagatatcgaaggccttttgcggcaacatacagtttggaacccatatggcgtgaagatcccggaaaccgaaaagaaaaccatcgcggacgaattcaccggtctagggtttcgtcgcagccatgtggaagaagctacagcggaatgcaaagaccgcgaagaggtcttggagtggcttctcatctatgttcctgatgatgacctcccacgatggtctctgccggaaggatattcggctggagtcagtcttggttctggtgatctcgcccgtgagggcaaagtcaaacggctggcatctgttggctatccagccgacatgtgctctcaaattttggacaggaagcacggcgacgaattggccgctgctgagcatctgcaaggcactttgacccatggaactcaattctcggccccgtcagtagccgacgaagacgaggaagcttgggcagaagaagcgactacgttagaggctatcttcggggaacgttatcaccgcatatcagccaggatctgcgagatcaacagcgaggcatcggatattccacaaaacacgattttccgcttccaaaagccctccgcccactatccaaccacacctcctgttatatcaatccaggccaagggcgtcccagcctatatacgtcttagtgcgatccgtcgggcagtgcagtatgccgaggaaaactttacgggtgaatctatgattttcaacattatggattggctggaggtcaatctgccgagcatcatggagaacccgggtaaattgcgggagatttccgctgtgacggcttcgtcggtagctgagacccaccaaattcctgtgcgttcgagtaggaagaatcgcagaggcattgactggaagattgactcggaacgaagcttggcgatccgtgatgcttgggaggccaaacaagataccgcgccgcagatcgagatgaatcggaaaagaaaagcacttcctgcatggaatatccaacatgaaataatacactctatcaactccaaccaggtgactatcatctcgggtgagactggtagtggtaaaagtacacaatccgtacagttcgtgctggacgacatgatccagcgaggactgggagctgctgccaacatcatctgcacgcagccacgacgaatctcggccctgggtcttgccgacagagttagcgatgagcggtgcgcagtagtcggtgatgaagttggatatgtgatccgaggcgagtcgaaagccaaacctggctcaacaaagatcacgtttgtgactactggtgtcttgctgcgccggatgcaatccggtggcgatgcggatggcaatgtcgcaagctccctcgcggacgtatcgcacgtgctggtcgatgaggtccacgagcgaagtctagatacagacttcttattggcgctgctgagggatgttctaaattaccgcaaggacctgaaagtcattctcatgagtgccaccctcgatgctggtatcttcatgagatactttggcagtcagagatccgttggactggtgaacattcctggccgaacattccctgtcgaagactactacctggatgacgttatccggtacacatcatttgcgccagaacttgccgagggctacgaggacgaggaagaaccccctcggggagaagaaacacttggcaaagccctgcggagcttgggcatgggaatcaattatgatttgatcgcagcgactgtcgaatacatcgattctcagctaggaaaccagccaggaggcatcttaatcttcctccctggtacattggagattgataggtgtctgaaggcagtcagtaggatccccgatatgcatcctctgccattacatgcctccttgcttccagccgaacaacgacgagtattccagagcgcgccaagaggaaagcgaaaggttattgccgctacaaacgtcgcggagacctcaatcacaatcgaggatgttgtcgccgtcattgacaccggtcgagtcaaggaaacgagctacgacccaaaggataacatggtccgtctccaagaagtatgggcatcacaagccgcttgcaaacagcgtcgtgggcgagcaggtcgtgtccgtgcaggtatctgctataagctctacacccgcaaagccgaagcaaatatggcccaacgaccagacccagagatccgccgtgttcccctggagcagctgtgtctgtctgtgaaatccatgaaaggcattgacgacgtcgccaccttcctagccaacaccattactccaccggagagcatagccgttgaaggcgcactaagcttcttgcatcgcgtaggcgctctagaccacgacagactcacagcactgggccgctacctctccatgatccccgcggatcttcgctgcgccaagctcatgatctacggctccatcttcggctgcatggaaccctgcctcacaatcgcagccatgctaacagtcaaaagtcccttcgtctcaccacgtgagaaacgcgacgaagctaacgccgccaaagcaaccttctctcgcccgggtgacggtgacctcctcaccgacctctcagcataccaagcctggtccgagcgaactcgcgctcagggcggctactggggcacccagtcgtggtgtgccgccaacttcctctcccaccagacgctgcgcgatatctcctccaaccgcgcgcagttcattacctcgctcaaagacgcaggcgtcctgccaatccagtattccgatgcgtcggcttcggcctggaatcgcaacgcaaccaatcgcaacttgatccgcgcccttgttgctggagccttccaacctcaggtcgcgcagatctcattcccggataagaagttcgccagctcggttactggtaccgtcgaggtggatccggatgctcgcactatcaagtacttcaatcaggagaacggccgtgtcttcattcaccccagctccatcctcttctctgcggctggctatcctagtgccgcggcatatctcagttactttaccaagatggctaccagcaaggtcttcatccgcgacctcacccgtgggttacttctcttcctttcctcggggtatcaccttctaaccttcttttttcttacttgcagctttcaactcgtactccctccttctattctgcggctctatagaactcgacactgtgggtcgtggactagttgtagacggctggctccgtctacgcggctgggcccggatcggcgtacttgtttcgcggcttcgcaccatgctagatgaggctcttacggagcggtttgataatccttcggttgtctccaatggcagcagtcttgctgatagagtgattgaggctgtcaaaaagttgattgagtttaatggacttgatcaataattcgcattggcgggttccgaggttgaaaatacatacagcggatatatcatcttagatgggaaaagaatcgaaatgatttacgagacatccatggttaaaaaataatcatctatacggtttaggctttataccatcttacgccgccttatacttgtcgcaaggtgataagtccggcatgtgtatgtatactctgtactctacagtcgaccgctcgacatactaatggacaatcctccttccaacggcatgcagatcatggggacctagctaaacatagcttcaaaatacttctcgggacttaaagtgagacagacagacttctgtctcctacaaagataaccgaagacctccgcttcccttattatggttcacaaattctacctcggaagatcgaaagctactccaacaacttcttccgaacatccggattacgctgaccacccgcaccttttagagaagttgatgccttcttctattgggcactgatggatccatccaatctcgctagagtccttatcggtggagagcccttacacccagttgaaggcgttgcttgcaaagttctttcgcgggaaatccgggatcggcttgttgcctatgtgtcgaaaaggaatgagtttcagagtatctatatttattgtcttgatatcgaagaagaaaaggttgaaggtgttgccttgagtagagttacggaatgggagcttcagcccagctggttacagagcagcatttggaaacccaaagtcttgcaagttcacattatctgacagctaagttcttttccggctaagagaacagacctgaagactggatgtcgtacttggaagtgtgtagttaccttgatgtagttatagaaatgggacgtcatattcgactattactagtacagtacaacatacagagtggcgcagagccagtcaggtgacttgtgtagatagagagtgtatcaacggtccccattccccaggggaaaaaaaacgaaaaaaggcggttagaacgcccggagagaaagagatcatcgtcaacgccttccgatcatttactctcatgttcggaaaatgatggcgtcaagtcatgtcgtcgtcagcccagtagagctgggaagaaacaaatccacgaagaaaacaaatgacagaatgaaggagatggaaaagactggaataacacgcaaacgccatgcataaaaaaccgattcgcctgttcacccatgttgaccgaaagaaaaacgagaaataagtttagagatcgtgaatggtggggagtaccagcaatactgaaagccagcttagcattgtatctgcacaccaccggggtattagtttgaggcaaggattagtagtttgcatagccgtccaagcgatctggatcattgagatcagagggctcgggcaaaacaaagtcggaggcaagcccagtttcgacaaagatcgaggcatgcttgaaacgacgatccgaatacttttcaaatatggcggcgtggtggcggcgagggttctcacagcattccatcagtgtgacgagtactggaatcagctgggaataaagataaccactgtaaaatgcgtgtgccggtgtctgattttgaatgttagcaatatgataattgaatgggttggagaagaaaacgtacccagttgcccttgttaagcagcatgcgagacaggcaatgggctccagcagcaataaagctagggggagtgcagacaaagcgctcatccataatagccagctcaaggaagtatttggcaacagtacgagtttcaaggtcgtattcatcagccttgctaatacggcgaaggaaactcataggaccaggccatccaagatcaaagtcgaggatggtgagcatgaaccgttctgccttcagaatctcgtcgacggaatatccaccgtcaaccatgtaaacgatctcttgcacggacggggctgtaatctcttcgaattttgcagcaatgaagattgctgtcgccccaacaagctgcaatttgcccatagaaactaccttgtacgacaggaaacggtcgatgtagtttactgtgaggaacagagtttcagggagcaagttaaagcgcccatgaacttgaacaagccagtccatcaaaaccgcgcgcatggaccactggagttcgctttgacgggccatgtaatcgggaaccggaagcatctcgatctacagacatggttagttcaagctggttatcaggcattgggagagtaaaacatacctctttctttcttagatgaaggaaaatttcatcgccatactccgcgaccatggtcgtatctaaaagttcctcctcaatatcttctggtgtctgttcgctttcgacgatgtctttcgcccggaacatctcacgagtggtcacattgctcatgcatggataaatgacggtggttccgtcggcgttatccccacggaaggagtagaagggtgcaacattgtactcggtatcatccccatcccattcctcgggctcagataccgccggcacgggttccttgacgtatgtgtatgtgtactctttcagatcttcggtctcggaaacggtggcatcagactccacgaggctggcggtatcaacgttcagcacgtttgaaggccgcactacaatactattcaaatgacgccctttctccactcccttgtggctggtcttggcatctgtgtctgtgttggtttccttggatgcagttttctcgggaacggtatgcaattggtctttgaatacggcgttgtttcgcttcgatttatacgccggttgggccttaccggcggggttcataggctttgttgtggcaacgctttcaataacacccttagttcctgccaaggtcatgcgacgttgggctggctgggacagtccaggagccttaacctcaactagagcaggctttccaccaacggcggagtcatcccgactagctcggttcatatccttggtgttgctaacatcgacgaatgcgcgtcggccagcattgttctgggccatcatactcagagcggggctcgatttgttgcgctggtggatgaccttatgattttgatgcagagacgaagggggcacgttctcatccccaacgactcggaagcgctgtggctgtaacatcagttagcatcaatatctccaagttctccaagtgtggtttaggatgaagcaactctagaccaaaagtgggcgaatacacgacaatgcgacaacgcggcgccgctttacgcgattgacgcgtaggtacagaagaatcgggcaaaccagaccataaacatagagctgacttacctttgcatccatgatcgtgaacaatgaagttgcaagacgtgagtgtcgagtctaccttgaagttggtagagagatgttgtttactttttgctcagttggggggagcggagttgcccggcgtgattggccagcccaggcaaaataaacagtcgataggacccgctcactcgttccttcccgatctagcccagtttgtcacttgaatgttacctaggcagaataggtaactttatagaactgactgaacaagtgaatgagcgagaatggaagtgacaaccgtgaagaagggagggttgtcccttgttcctaaagatgtgccttgttgacaatgcacgctattcctaaattggaggttacggtggcgcacgccatcctactgtgcaaactgccctgcgactgttatgcacgcctgtgtcatcatatgtatgctaggctcaaagtttatggaagttttgattaaataatatagagaacatcgaagggaagatctgagtttattttacctttatttgagccctatttgccggtttctcagtcgaatgtctagactagataggtctatcaacctatagttattgaaggcaaatttgcaagataaataccatggtacctctaattagcttctggggtatcaattttatacattgttcatcatcctagtgagaatatgtacattgtaatcatgaccttgtcaaattgatatcaacctttcaaggttccatggttacaactttccgaggtcgaggactcgggacgttgatagaatgttaaatgtttgttctgtttgtctatggtttgcattgtttggtacatctttgacgtcattaaccttatcggcgcgtctcctgcgacgtctgtcgaacatcgtttttgattaaagaaccacgaaaacaagattagatattactaaaaagttatctccaagtacattcaatagtaatgcatagttaccgacaataatatcccaaaataattcatgtttgcgagtacaatcgccattttatatcataatctagatctgacgcgctatctacacgagaccacgtgagagctacaccgccgtcacaagaggtgggacacccggaatgaagcggttcctgtttggcagctttgtgctcaaccgaaacccactcctatcattgcgacggtcgtcggcttttccagtctcgccaagtggtgcggggcttcagatcagaggcaatgagcagtttcggagtaaattatagacagtagccacgttctcggatccgatgatcttcatcgtcaacatatccaaaggaccttttgcgcccagtctctcagcatcaccgcctgactccaccaagcagaaatgttccccccttttcatcgcctattttcttgagaaatcactaaaactgtgcaatcacggatttgcgatgtcccgatctcacttttgtagccaggttccaaggagaaaggaatgatctgtaacgccgatgcgggattccctttttaaccttcttacataggtccgaggaggggtaaatccatgttgcagatcatgcgagacaactccagagagtcatgcgatattatgaaagagaatattctgggtattgaaacggtttggttctttcggtgatatcctttcggctgagtataaatatctaggtccggtcctctaggcggatcaacaaaacgtccataaaccaccctaccctagcgattttgctattaaaccacattataagtgtcgcgatatcttgtattttccaattcgcatagtaaatgagcaatgcgacaagggtgatggtgggaaaatgactggacaatgtcaattctgtccaagcgcacacctccacaacagaccaaaaaaaggtatgggttgctacgtggtcacgctaggaactagctgcaagcccataaatctattgggcgctattcctttatcttattttacacccttagccctcgataccctagatagttacttgtagcgatagttagaggtacccaagctacttgctttgtgtgaagcgctgcatcctcccctccccaacagtcttaggtagcccacactcgcttacacttcatccctcaagactcaaagatcggattatattctcaatttcgtacataatatacaagaaggagggttagacaaagtgttccgtcactcggcgcaatggcatccggcttgcgacagcttttgcgcctttgcgaaaagatacagcattgggatggcttcacacatagttatttttttcgatgcatagaatagttgcaaatcaaatgaagattttatatatattcattaatgccatgggatgtgatggctgcatcgatgggcgccggaagcgcaaatcgccatgtcaccgactcaggcaggccgttttctcgctttaggtgaaaccatcgtacgcacccacctcaaccttcttccttccatccaacaacccctcgaacaaatcgccatcagcgctgtcaacagtattgggtatgtgtctctactctcgttcgatctcacttttcactcccctgaccccgttttaatcctggagatgccaccactgacatagcctcagcgcttcgtagaattgacaatcccctctcgacctcgaccgaacccatccttcgacccttcgccctgtcttggacaatccaggtatctgcgatactggaagtctctgtttgagttgaattaggtgtgttgaaatatctctccattcttctccgggtcatctcgcttgcttcccccaagcccgcctccaaggtcggccggactcggttagcgacacatccatccatcatcttccaagacacaagccatccttattgtatattcgagcatttggaaccccattgtgttaacctctatggtctgttttccttcaggttgcccacatttacccttctgagtcgcttccggctcttgcgactgcagattcccctcccacctccatcgaaggttttgcttcgacggtctctatatttctatatttctatacatcaagaccgggggtggtccatccaccagcctgatcgtttgaattcaacaattgtggtaggtttgatggattcttccctctacacctgcccttcctctgtgtcttgccatggatcacattcccgccctctacggcacacaagcagtgggttgatgcagaatttggtatagcagtggagtattactcaatttggaacactttgatatgcaaccggttcagcatgaagggctttctggcctggtcgagcagccgggtctggcagactctgccaatgtagctcgagacctgtcgctgaaaggcccagcacccaagaatatcgcctttgagttacttcttgatgagaactccaaagtccgagctcgtattccgatgcgcgttcaaatctatccccatgataccacggactcgatcgtcacaacggtcaaaaatttctatggaatatatgacggtactgccagtggggtcagcttcgaggatgaacatgggaccaccctcatcgcaaggtacgagaatctcaagaacaatcggactgtatacgtgcgagtcattcccattcaaccatatggggatcacttctataacgggttcaatgtcgagcctcgcaagcgacccagtctggcggagcctttccagatgttagatggaacgtcgccggcgttagatcagccaggacggccatcctctcggcttgcgagaaagcgcagcacctctccgtcgaaccggagtctccgcagcgcttctcagcacaagcctccctcccgcgcgggcaacaaaagccgggcctcgagcacccatggagctttccatgatgatgatgactacagcgataccgagagcgcttatgctcgcagggctcgcaatgagctctttgctagctcggatatcagcatggagaatatactacaagatggtcgtcgcaaacgacccaagttcgatagctctgtgagtgactcatacgagagggtttttctctatcaaagactgtcgttaatcaatatgttccccttaggagctccccctgtttgttcctccccaagtgccccttactacctccacttcttccatctctccccagcgtcgatcgattggccaggatggcgctgggtcgcctttcgcacgcccaccgcaacccccgtatagttatcaacatgcgcttccatcgccgcagagctatggccacagcgaatatggtgtccactcggggcgcaatacgatttatgcgactcccgtggttccagaccatggaaatcgcatgcgcgacacgggagcctataacagctcggctagccgagtgagtggtccaggtatattgcccacacctgaccccactattgcaagctgcatctccgatgaggatgtggcgatgcaattgatacgcttgggcgatgcgtccaatttctctcacggacgcacctctgcctcgacattggacgatgctttcagtggtgccgctgacgctgcctcatccactggtgctacaagcgatggggaagactttagcgaggacgaggacgacttgccagctcgtcgccagaggttggactccagcccaatgctgccgccgggaaccatcaagcgccacctcaagggcctggatgacatccttcccagcgccgatagcagcgaccacagctcggatggtgcagatgatggtatcaaaagtgaagcggaggaggatatcctttacaaggagtttgcacctaaggcaaagaagccgaaaagccgccccacatctttcaaggttcgcagccagaagcctgcgcctgcgaaattgaacaaaagcaagaatgctatgcccgctcctcgcaaatcatccgagaagtcggctgcgcctgttccacctctcagcccggcgtcttcccgaaaggtctcggggggctcagtcaacttccagcaccagctcggtgcggatgaggaagatctttctaccaagcctcgctgtcagcgatgccgcaagagcaagaaaggctgtgatcgtcagcgcccctgtggacgttgcaaggatgcaggcattggaattgacggctgtctcagtgaggatgagggcaatggtcgcaaagggcgttacggtcgtcatatgggtgtccccgtgaagaagaacggggaagaaatggatgaagacgaggaggagttttcattaacgcctgcgacccctcccgtctcttcgtctatagcagacaagaataagaagcggaagcgctagtggagctgcaggttgcaattgcccccgctatctctaagcgccgaactgtttcgcacctccaatcttcttcgtgaccatggggtctctcattcatcttaccatcctcactatgggccaatctcatccaccctcactctctcatttcgccttcttctggccagcgccagagacagtccttatactagcatcatcatttgcgcttctcactacacattcccttctctggttacaagccatgcttcctccattgtacactgccaagcggttgatctattgttgttgtgtctcttcggcgtcttagtgtttctgtggctatatgcttcttgtcacatccactcgctcattcggaatcaatgctactgggttatttatcattgtctatgtcggtttcatgtgtgtggtgtacggatcagtagcggaagcattatatacttccgagggatggcgaggtcaaagcgtgacaagttgtagaacatatggccgatctcgacctatttcgtcttccgggtagttagggagtcaatgaaagggtttcaaatttttattttgcacttcaatcttccgacgttccatttagtcgtctcatcatggcttaagttacatggagacatggcgggatgagtcacatgacaagagcggtgtgattggccccgcaacttttttaaagagcttaactttctcgaacctcaaaacgcttgcattcttttgccaaacggcgtgttgcttatttctagttgcattttcgcttttaacgggaacagaatttaggtatcccagcgctgagactgcatgtaacgcggtgcgcaaaccagcccctctacacgaacttttctccaaccgcccagcaagccgcattaagcgccttgtctgaaaagcgaccacaatgcctcccaaagctgcctctcgtggaagcgcccgtggaggggccgccaaccgtggtgctcgaaccgacacaactactcctactcccgctggcggggacactacgcaaaatgctcccacggcaactagcgcgcccggtcctgcgagtcgagcctcagtacaacggcttcaatcactgaacaaacgcacaccctccggcagtatcgcgcccagcagtcggcctccatccgcgcttggtggtgagccggccaaaccagtcatgaaacacaaaccgaaggccgttggacgtcgcagcaagcaggagcgagatgagatagagagacttgaacaagaacgatacaatgagcgtctgaaggaggctgccgctatccaacgtggccgtggcggtactgctcgtcgtgctgggttccgtggccgtggtggacctatggctatgggcatgagtggatttggtggccgaggcgggaaacgaggccgtggtggttatggcggcggaagtggaggtggttatggaggaagcgcaggcggtgcaggatcaggatacaatcggtctggtcttactggggtcaaccgtgggcgcgcatatgactcttcagacgacgaagagaatgcactccgtgtcagcatcgatcatatcaacctcgatagcgacgaggaggattgggatacgccgaaggatttcaagggcaaacaacctagcaggtcgagcggggaacgcggacttcgccctgttcgtgttgagcgacatgaacacgaggaaagagtcatcagcgtcaacatggaatctagcaccagcagaaccgccgacctccgcaaaaaagcagagaaggagaaagcagcgaaggatgtcggccgtacacctaccaaggttaaacccgaaccccgagacgacgatacaactatgccggatgccattccacatgcagatgacgatgacctcctaccagagcataatgttcgtgtgcgctcggctcagagcatgagcccaacaaagaggagcacaacagaattacgatcgattcaacccacgcctgagcccgaaatcccagacccacgcagcctacttcacactaaggaggaaatcgacgaatatgaccgacacatggaagatttggctataattaaggatcttcttgttcccaaggagtcaaagaatgccactacagaagcagaaactaccgaaggagctgccgaaggtaaacccgcggcagtggaaggacaggaaggtgaccaaccgaacgaagaaaaggaagaagaacaggaagaagacaaccctctacatggccagatgttcctcatgcaattcccaccgatgaccccctacctcagagtcgccggttcttcccaagacaatcaacaccaagctgcagcaaccgcacctccgccgaacgagatcaagcgtgaagcgggcgacgacgtggaaattgtgggcagcacccaagcaaccgaattaaaagagaacagtgtcattacagccggccatccatggtctttgcccacaggtcgtgtcggcaaattgaatgtacaccagtccggccgtgtgaccctagattggggtggaatcagtatggagttggatcgtggagcaccggttggtttcgtccaggaagccgtcatcttgtcgaaggttccaccggagtcggaagaagacataccaaaacatgtttggtctatgggccaattatctggcaagttcacagtcacgccgaactgggatgagatgctttgatacctctacaaggcatcttatgatgaatggaaaagaaatttgcaagcttactgcagcaattgtcttggttgttaacttgacaatcaccaaaaatagttagactggggtaaagtttcccttttcctcctcaagaattcaactttgaatcccatctgtagtcacgtgactatttttatatgtatgtgcaggattgcgatagagatagctagttgtctctgctcgttctttctctcccagtctctcttcgtagctaagagaaaaatacaactgtattgcacgctatattccaacttttgtgtgactttacaatggctgcggaccagcttagtaatttcaccaaaagtgccaaggcctagttaactatcgcgcaagctgctccgtacacgaactttatttgcgcgtgtcgaattcagagcatttgaccattacatcctccatgcccaatagcaactacggtcgagcacaagcgacaattcagccaatccaactactcataatccctctacaatgcctgcatagaccaaatcaagtgtctccggtgctacacgagtgacgaaccttcgccatgtcgttgcgtcctctcggatatcaatgcaaactcccctatgcgcaattcttccgcaatggactgcaaacaaaacaaaatatcacacaacacctgagatccttttctcaattacgcgacacccattgcgcacgtcgctggtccgcgacatttccacaccatgccaacaaagctttttcgctacggagcttgctcggtgatcttttgagacctgcacacactattcggggccagggcaagggattgtgggctcaacaatctcgctatgagagctctgcggccaaagaaccagaactctgcgcacactgcggtggaaaaaccatccccaaggctagaaaacatgtcgagcctggcaacccctccagcggctggtattgcaaaccctgtgttcggaacatccgtgcccatggccatctgccaaatgaggagcagcttgcaggcatccatcggcggaggttgatcagggcgagtggagaggcaagcaaaacaagcccatgcgggcactgcggccagatgacagctccgagaagcagccgtaaattcattgatgcgaacaacccttctgctgggtttcactgtcggacatgcgttcggcatgtcaatcatcacggtaccctcccaaccgacttagatctcgcagcgttccagtaccgcaaacagatgcggagtaggcgtcctcctactgttgcctcaaaaaataacaagtcagttacttcgaccggagaatcagcagtggcccgcaaacattccaagtctcccaaacagatgaaacagagccgcggcgaatacccttgcatgcactgtggtgacaaaaccatctctagcagcaaacgaaggctcgttgagccccagaatcccgcggcaggttactactgccagccatgtacacgatctctacttgaaacggatgccttgccaagcaccgtcaaaattgcagcgctcaggaaactcagagcgacccgtatgcaaagcaacccacgagttatgaaaagcccttgtgtccactgcggtgagatcaccgcccccagcagcaagcgccggctagttgaagcgaagaacgctcaatccgggtattactgccgcgcctgtgcggactgtttaatagaaaccaattccctgcctagcgacatacgccttgcagttcgcagagcgcgagagcaggtcaggctgaaaaacttgcaagccagtctatctaaagaatcgcagtccccggtatctccgcaggacggagaagctacgccaacggatattctcacggacaataccgcaaagacttgcgcgcactgcagaaccgaagagaacacgtcggaccactgaacccggatatgtgtttttgtgtgtggagctttttgatctcaacggcttgtttttgaggctgggggtacttttgcgcagagaccgcatgaaaaaaaagtacggactcggattagagcggatatcaaggctggtcaacggttggattgctgccagtgcaccgcgtgctcaaatcgatggccgtcctttgatctggtcgatgccaagcgcaagggtcttcatatcttgattttagtaccacccataaatgcgcgtcgtcatcttgcctgcggggtgtgctcgtctattcgcccggactttgcgcctgcgttgacgatcctgagtggcgctgtccgttaagcctcgggatgccttggagctataattagaacttggcggaacaaaatgggatttttattgtatatacagggggtggacatgtatgctatagatgcatatgtcaataggcatctggaattattgaatcaccctaacagcagcgcatctaagaagatatcccgactaaaataaagaataataaagaataaataaacactttggatagcttcagacctgggaaactgggtaaccaatcagagctcgcagaattcagggacacacccccactcctggacggcccagggacacagggccaaagaaagccaaagagcggctcggccaatcagagcctcggcctgactggcttcattttgtttttcccttaatttccctttcccccccctgggctgtttcggctttttgggttcttgttcttcttcgttctctctttcaatcctcctctacggctaagagtgagttgggttctgacaattgaaagagtaaagacgaaataccccggatactcccctcttccgtgtttggccccctattcccccggttgcctgactgcgacaattcaacacacccactcggacctgagtggcatgctttgagatcctcgcaacttataccttatattcgtgaagacattcatctgagtcatatcgtcacttccaacctcttctccacctccatctgcagactgcagcactgttgccttgccaactccagaccccccgatccccacgacccgcaccagtcagcttggcgttgcttgtcctccataggcaacaacgcaaagcatttgcgcgccagtctattttcatacactatacatctataatctgccacaatgaaaccatccaccttcctggtcttccttgccccggccgcggtgctcgccggctcacaacaacccgccgcaggtgccagcctctcctccgacattgcacacaattcgcccgctgtctcattaccagaactcgctccgcgggaacagttcgcaccatttgcggaccatgatctgccatctgatgagatgcgcttgctcgctgctcgctatgtcctccgcgcgcgcagtgagggctccctcggccagaccccatggattggcatggcgatcggattgacctttactgctctggcggctgtcatgctcgggtgattgtcggcatggaatgctttgaaacgaaccctagctcgactgatccatatacctctttctccgcctcgactacttctttttctcttgacacgacacgtgaaacgccgggcaccgctcgaactctgtttatcttttactccgctcgacatatttctgcgacccttcttctttatcttcattttcttatggtcttttgcagcgaatttttaccattttgtttatttttgcatccatggccttgtgttctggcgtgggattggatctttgagcccccttttttacctatcgcattccccgacttgctgagttacttggtactgttgggagtatagagttacatgttgtacgcatgttgtacatgatacctttttgtttctaatgcagattctcccgtgtgtatgacctaattagtatatatagatatggccaatacgaactgactatacgtttttgcttttcttccttttctttcagaccacatttttcttagtttacgcctttctcatggctagactcggactggggatggctttctttgttactagatgagcaacccattgccagggcaaacacagagttctcgagaactgtcatattgatattttggtttccttcaaatctattttcaaatacccttagaaagagagatctttaagtgggcatataccctcgctacactcgaccccaaagacaactatactacagccctaactttcaccatggcctcggacaaatatccaccctacgtaccgatgccctcgctccgccacgagctagggctggtgttcggcttcttatctctgtgcatagtggttatgggagcatacgttgctctctggcgtggtgagttcccctcccactctcctttccatcatatatcgatgtaaagatcagcaagaccgtccgtggtcatgtcaaacacatacgtacatacaacttcaatgcgatttacttcagcataatacctacactacccctaacagccagccccagtatcccaaacccgcttagacgcccaagacctcgcccgccgcaaagcctttcgcagcaaaaccccaacccaacaacccctaggaacaaaaccccccttaacagcaggccgaagcccaagtcccatcaaagacacatccacctcaaactccaaagcagctgtgcaagaaaaaatgctcgaccgcgtcggcatgcccgagaaccgtgccgagctaccagtccacgggatggaggtgtacgcggctggaaaggggaatgcgagcacatcgcaaatcagaagtccacttggtcaggctatgccgcttagtattgttagtcctgttggtccgcttgggggtagcggggttgcgggtagggctgctagctctgttagtctagttggaggtgggattgcgcttgagtctattgttggggtggcgttgaaggagggagaagtttgagtcgaagtcctttgcgcgttgatgggttccggtcggtgagtccggcgagaaggtttgggggtggaattggtccacctgttgagattgggcctgcgcctagtagggagtaaggtgttgcattagtttataatgatgtaacatattattttgtatcgcagctaggagcaattaatatgacaaggagaacgctaagagaagtaaattttagactaagtccacaatgagagataatatttgtaatcggtcgatgaatgtatgtaccttgaaagaagaagaaattcgggatagggttatgcgggtcagaagtgtgaatagcttcaagtgatcccaaaggagaaaaaaaggaccccagaggttcttcaacagcagctagcctagggacagtttcctcgttggtattggactaatctcaccctgctcgaggaacagagcacatcccatctgagccatgggtgttgggaattacaatatctgccttgacctttctatttataatcacttttgtttatcgttccttcctcggcaaatacccaggaccgctcttgtctgggagcagcccttcctgccattccaacaattgtcgtaccttctaagattccttctcttctactgagttccacgtcatgcatggcctactaagctttctggaagtatggcggtttgatgctttggaaaaattttgatattgtctccaagggttgtccatatcaattcaactcatatagttgacattttgaatccttctgggtatattttacattacattacaccaccagtcatctatccacacaccggctcgtcaaacccacgcgtccacaacaacgaacccatgatgaccaccaaaaacccaagcgcgacaagcacactggcacttccatacaaatacgcatgacgccgatgagacagtcctttcaattcagcaacccaggtactgatagtggtcgtgctcccgcagaatccatccataacaccctgcagcacctggcaacctgtcagagcagcaggaaccaccgccccaagatcactgacatgctgcaagtcatagcacataccctcgatgatggtcccaaagatattgaccgtaaacgtgccgagggggaaggtcggaatcctgccattcaggtgcagcgagacatagaaccgaaggagacagccaagcggtgaaaagacaatagcgaacaccgcccggccgcgccacacatccgggcctttatgtcggtctggcggccagatggccaggaacaccgccccgagccaacatccccaggcaagcatgaccacaagagggtcgaggactcggcgcgtgagcgcgaagggcacggtgggtgtcacgcgtgttagagccagggcaatatgcgcgccgacgataagtgccgacaggctcagtgacacggtgagtataatcacagcgaccagcgccataaagctatacccaccattacgggaggcaatgtgagatccggttggcagggatgggtcggggagggcatttgccagggcgaggaagacgtcccgcataaaggacgagaaggaggtgaagcagccacagaacccggtcgtcagaccaatgtacagagggatagtcttcttcacagccatgtgtttccggctcttgactttgggctcggtatcaactgcatctgcaggtgcttctttggttattgttttgccccattcttcgcggaataactgctggtcttcgctcaggaaacccattaccaggcttccggctacatttgcccataacacccctgttacgacaggcgcgcctgtataaaatgtcagagcctgtaggcctaggcgggccagtgtaccccagagcgagaagaagattagataggagacggtgtagatgtgggttgcgtgtttggagaggggcggcgcagcagatgcaggttgtggtacaggtgctgcgcggtcacccgagttttgccatgattcatttgcattcgcctgtcgggcctctcttgaagggtcattgtttcgagaggggttatcaacatcggcagttgatggcattgctgtttcagtgttgaagggaggataaggggaaaagtttgccaagaaccggagaccggagatcaggtggagtccgataagattagcggtcattcgcagagtatatgaggggaagaagataaagaggtgtgtcttgtctccctcctcctcctcctcttcttcttcttcttctctctctctctctctctctttcctctttcctctttatataccctctatacttcaccatgtctctcccatcaaatgtccacgtctcctcccatccctgtctacaagccaagctctccctcatccgctcatcttccaccaccccgcgtgagacaagaggcttggtccatgacattgccaatatcctaggcgttgaagccttctcagggctgaagttagtcaaaacaggaacggtaaatagatccccaagaccgagatccataccagcattgcgatctcctaacactcattcccaggacaccacgcccctcggaattgaatatgaaacccagggcattgacccattagacctagctctagtgccaattctccgctctggtctaggaatggttgatggtgagtgattcttctattccgcgtgatccgctctagccagcactgcaactgtagcccatgttattccctgcaatatgaccatactactctcctattccccaattcccattcctatatccaatcccaaacaccacagttgcaatttcattcgcatttacagcttatctcctcctttcgtcatcccccccactccctatccttatcccccactcctaacacgtccacgggtccaaaaccccgcttacacaaccccacagccctaaacgacctcctcccaacctcagtcccagtctaccacctgggcctgttccgcgaaaaggtctctcttcaacccgtagagtactacaacaacctccccttccaccggtcggagctgtcgccggcctcgccagcttctctgaacccaaccaccaacaccgcagcggcaagcctggcggtgctgctagatccggttatcgctactggtgcgacggccgaggcggcgatccaattgctgcgcgattggggtgtgaagaaggttattatgcttagcttgcttgcttcggaagagggggttaagcgtgctgcggggacttggggtgatgttgaggtttgggtcggtgctattgataagggtgttgatgagaagggcatgatcgtgcctggtattggtgatattggtgatcgcttgtttgttgctgttggaaagtagacttaactttatcagcagtgaagcatggctgttgagggtttagatactacagatgattatgtacctaccactacaactacaacttcgctacaaatgatcaaggctttaaactacaattgaagtctacaatctagtatttaggaaagaggttgtccccgccagataattcatcgataacgtatagtacatggaaatggcataaaacatgtgcaggtgaaacaaatgcgaaaattgtcaaagcaatgctgagcgttaagagcatggaaagcaaaagacggggtcggaggcgcgcagacaattaacatcaagtacagcggctggaagccaaccaaagaaatagaggtaagtggcaagatatgagaaagaaagaaaaaagaaatcaacacgcacgcgaacgcatgaaaagtcaaaaggtatcgaaagcacgaaaatcagatggacggggggcacgattaggggttagtatgaaccataaagtcaaactccacggagtgcgaaagtacacacaggaccagccaggtgtcgaagacggaaagcagaaacaccacactggactccctggtgtaataaaaagcaggggaaatgcaaaaaaaagcaaaaaaaaagcaaagactaggaaccaccgagagggatatcaaaaggcgaagtattccaaaacaagcccaacaccccgcctgcccactggcatgtccagtcctagttccgaggtgtcccaatgaaagcgtccaacaaatgagagtaagaaattgaaaacacaaatttcaagaaaaaagcagaccgactcaaacagattgaagagaaaaaatttagtatgcggtgccgacgctagcaagcgacttagttggcaccgcatggatcggctgatccttgcgaacacggagagaatcttcgtatccgaccagggcctgagagtgaagcttgaatgattcgcccatcaacttggtgattctgtaaagcggttagttactggaccataagagtgaatagggatgaaaacgtacccccagacaaccacgccgtctaggatgttaccccatacacgggcgacagtagagctgagttttccaaaggcgtcgatggcatcgtcgtcaaacagattgcggaccttgttgtagagggccaattcagcctcatttgccggctcatcgtcatgttccagacggtagagccagaggctcagaatgaccatcagatccaggccgcacagagggttctcaacactccagttggtggcagatgtcttggcaacccaattgatgccctgaatggcggcaatctcgatgcattcgaaacattgttggataactttgttcatctcctgcgaacgcttgaccttctcacgagcgacggtcatcgcagccgccacctcatatgaggagtggtaccgcatcgcctcctggatggatttaaggtcaacttccaggcgggcgcgggtgttgcggtagaccgccatcgagttgaagatcaaggggtgacccttctgaggggtgctaagcgggaccacgatcgtttccggttcgcacacctcaagggagttctcccaggtctcgagggccaggcgcagcttgtactcggtaaccacatcttggagcgcctcgaagctgcgcttgtggctccaaacttgcaagaacaaggcgttaatgagaacacgagtggcgaaagcactgtagcgtgtctgttcaccctggaaaaggcagtcgtgggcctcacgcacagtcaaggcgctcgagaccgtgccacggcgccaactctcatcatcagcctcgtccaaattccagagagactctgaagatgggagctccaagtcgtcaaactcatcgaagctcatagcgggggtgtgattgaatgtgagggtcaacatgccgaagaaaatatacacggcgaaatatgtacgacggcaggattcgtcctcaatccactcctcgcgcgatggctggacattctggcgcgcctgagtgcgcaacttgagctggtatcggttgccggcgaccatgttggccaggagactcttgatcgaacaagtccattcaaggcccttcgggtcaccactccagctctcaaataccatgttcaacaaagtagcctgcatcaatgtcaaggggcacttgcgggaatcaaaattgtccttgtgttgcaggaattggttgaccaggaccttggagccgacgtggagcatgaaggcgtgttcgcgctcgaaagtgtaaagagcaccaatcgacaaaaccgcaagcaacagcggggctggaacttgggaaggcttaaatgattcctggtgcaggaatggcaagtgaggatggtacagattaaagtaggtggacaaataccggttcagcgcaaccgtggaaggaagctggaaagtatctggaagcgcacctaggctgtctgatccctgaatccgatcaactacatagttgcgttccatctcgttagcgagctggggagccttgggaagagtcaacgcttgactagggccaggtgagcgacggtagttgaccgggctgaccggaccagtcatggaggggtagggcgacagcgcattcggggtagagtgccccgacataggcagcgagttggacatcagaaggtcgccgacagggccatggcgatcaacgagggtgggcattgaccccggttccgcgggggatatgagcgtgtcccagggcatctgaggcagagtggcgttgcccgagaggtagggctcgaaggagccgcgtcctggcgaaagcgattcggaacgctcggagacctgaccggtcgccgctgctgcagccttatgttggaaatctgtcatcaacatggctgcagtttcaaggtcgaccataccatcattgctgctagcctcgatctgctccagggtcgtcgggtcaatggtgaccgacggccgagctggggcagatgagtttttctgaacccctccaccgcgtctgcgtccctctgcaaccagggggataccgccatccttggcgtgcaccgttctgtcatgtcgcagaagaagatcgcgacggacgaaggtactgcggcattttaaacacttgaagggtctttctttcgtgtctatacattttcgagtctattagcggggggggaaacaaaataacacatagggaatgttggcaatcttacgtgagcgctcatggcgactgcgatgttcacttctgctaaacgcgcgattgcaaaattggcacttatatttcttttctggagctgatgttttcttggccggtgagttggccgtcccaggtgctgaaggtgccatgtgtgcgggttatctcttagcaagagagtagaatggacggtggtattgtcccctgagtaagctcgcaccggttctgtaggcgtgtcgatgacaggatttcgttgggatgtctgatcattccttgagcggggggaaagggaagtaaaggtatatcgagagtggtgtccagccacaagtaggaaatattaaagaagcaaacgctgaagggaaaaaaagaatggcgggatgatcaaccgcgattagatgaggaaaggggaggggaagaagagaggggaaggaggatgaggagaataagaaggaatttgggagttgggaaatcgggttttttggttttggggggggnnnnnnnnnnnnnnnnnnnnnnnnnnnnnnnnnnnnnnnnnnnnnnnnnnnnnnnnnnnnnnnnnnnnnnnnnnnnnnnnnnnnnnnnnnnnnnnnnnnnnnnnnnnnnnnnnnnnnnnnnnnnnnnnnnnnnnnnnnnnnnnnnnnnnnnnnnnnnnnnggggtggagggggagaggggaggaagggaggggggggaagggaaaaggacgtgggtttaagctaatcgcttacttttacgcgtcgaagtacagaccagggccatccgagggtaaaagcgggaccgatcaccgcgagaatcaccgccgagcttatcatcgcgctacctaggtatcccagccacctctccggccacgcactttaccttcctctgtccacccactatcttactcaaatgtgccccccctttctttaccatacaacatacggaatcgacacgtaattattctaaaaaagccctatagatttgtcccgatcgcaagcccacatggtctaatttgattttccccttggatctttattatcataattaaacactacagggtcgatcatttaaatgtttttagaaattgctgcgagggtgatttacatgtactccgttgtgggttaggttattgaatcgtgcccctcgctcagggtttttatggggacgggggaaattctttgtttatcgaaattatgtggcatgtgaggcgattcgatcgtggcacacttggagaggctgtgagaatagccccttattcactaatctcggaggtttccccctacagggggagtatatcagtctcacctgagaaacctggaaaagggtatcgtacggtttgatatcagaccctagacattgatagatcgcaactatggttcacatccgttttacccctcaacccctccagtcccaagatccacagacaacatccatggatacatacatctatatcaatttctagggcataactaccgacgctggtatactgcttacatttataatatcgttgtcacacaactccgaatctataatctatgcttggagaatgagacagggatatcagatatagagttgcatttatcttctctgaatgtaagaatgccgatgctgagaatggcactttgatgcgctggagtatacacatccccacgctaaaatagttacaccaatgtgggaaagtagatcgatccaacatgaaatcaattctatgtctgggtgcccatcagccccgtctcctgacagatcatcccactgtacttttgtcgcctcacaaattggctggtccagattcagtctcagctgtcgccctccaaccctaatatagttgcccccgccctgtggctgttcatctgtttgactgtgccacgctcgagattatgtgttccagccgtgtacaactgcattatgtaggattgatgtaagtaccctgtattgtcctcgaggcatcacctgccgaactacatccagaaaggatcgacagagcagaatgcaaatcggagcgttggatgggcatcttctgattgactagttgtacgttgtccttttagtttgcattgccagcacaaacgattacggctaaccgcgctacaaatgctatactacggccgaatgcctagttagctgtcaaatctttcgaggctccacacggtgaagttgcagttttatacaccgcaaaacctgccagtcatgtgtactctccgctccaaagtaacaccgttacctatcaccgagctggaaattgggaatcgcgagttcccgggtcctatcagtggggcgaagccaacacttacatcattggagcccgaagatcccggacgcggaccaccgacgcggttacttgggaaacgcgcttcgaacacggcacgtctctttcacctggacaagcaaatggagttggaattagcacaagtttcacctcatatcgaccggcatatggagtcctatctagcctgtacctgagcacccccttgattcgcggaagccaaatccctaaatcctgtcccggacttccggttgatcatcgaagcctgggcgaaacttcatctgatctggtggatctagacttatcaactagcttcaagccccggcggtgaggtcggacggcttaggtttttcaccaagggatcaaaaccttcgattcttgatgcaaacccaaccggtcgacctccttcgagctgctgctcggtccacttcccgatgcagcggaccgacccagtctaacgctctcgacccaggaacgaaaagcaaaacaagttggcaatgatatcaaacggagagcggtgacttgaccgcctggcaaatactttattccttccttgcctcgaaaggtaatacaccagaggatccaccattcccaatcccttgggccgcaagtccgggttatgtctttggtctttcattccatgcccctccgagcggtcaaaagcacgaacaaaagaaccatcgaaaacccgcccaattatggatctgcacggaggatccaatcggaccagttacgaatcagatattttcgaccattctcccttcgagctctgctccacctcagcaagcccactattgtaacaagaatttcaggaacctcttccccggtgccccctgagctagtggacaccgacagacgggcgttgctggagcccatcgtcccgactactccatagccaaggtccggcgtctccgccgtggacgccaggacggtctggaatctcccaactcggtcctattctgtgagtaagcccaagccagccgtctccaagccagacatgtcggtgaagcccgtttcgtgtcaatatatttggacttcaccgcttcggcaagattccaactcggtaggttgtacggagtatgtatgttgtatgaagaatctattgaacaagcctgtccccacgggtctcgacttcaaccgacttaacggtgtgagggtcattattgatcgcgtaaatcgggaaactggattttggcttgaaattcaagtctccattgtgcgcgctatcgccgatttactttcgctaaataatggaccccaacatcccagcgttgagacaaagccccgagtcgctctccacccaacgcgtgctttgtgttgtacgtcgtaaagctctttaccagacaacgggccgtcggtgggtttcagagtacggacgtattacacaataatagaaaatgcgcctgcctactcggtccaggaagtccatttccgaattctacgttcgcaccgaccatcccgacacgagtctggacttcgggcgcccgcgtcttgtaaccgcatccagcgacacgggtaaacagaagcttttcgtgtagcgtgtagcatgtggatattgagaaacctgaaatataaaattcagagccctctactccgtaggtatggagtatgtacggagtcctatccggcctatgttgtgctttgtctagttgtacattactgtactccatactcctactccgttcatgtcgatgatctacagctgcatgacaggcctgttcatccaacttgttttgaaccatggaaacatgatcaatcgcagatgcgatcgcccaatccctggatcgtgacggaaggggacgtccggggaagacctcccggtccatggttcactcccggagcttgattctcttcgtatcagacggacgagtcacaattccatttctgcacaacctgcgagacagactgaggcccggccgatttcagtgtctgcacatacatataacgtgccgtgcatagaaacgcaagtgccctcctcgaccccttgtcgcgttggcaaattagctgtgttgattggacgattcctccgatgcaggggatacaccacatatgcgagcaccaattcatcacattcgcgagatcgttcaatatcatccatgcatttttactgtgtaatattgctgatctctaacatacttatccaacggagatggtcccctcctccccccgcgcggagatgcgccgtcggaattttctcgaaaaaggtggacacggggctagggagactaaattaggaaattgacggagaacggagggcccggagagcgctcttcgtttggagtgtcgcggcttgattgctcgaaccccgctaaggtttaaacgtgcgacgcgcccgtcttcgagaacataggaatcaccgatgaatagactttcatagtgtagacttgggggggctactccatccgataacaaaggcaggcgggaatgggaagtaggtggggaactggccgtcgtgtcgcatcgaggtgggaagaagaagaaaaaagaatgaaaaggggggagttaatgatcatcggagacccaggactccgggtaaacaagagggtgggatcgtgtcgctattgggtgtgcgctgcaccgagcggcaggattgggtctcggcaggtgagaatctctccggctggggcggcttgtgagtggtgatgatgtcgtctgggttcctgcgactggctggctgcaaggaacaaggaacgagcgtcgtggcaattttttaatttgaagcccgtttgagttgctatcgggcttgccctggaggagtactccgtatacagcttactccgaaggtctaggcgcctcttggtttattggatttcttagtctcattctcacttactttctataacatactccgtactccatccgtagtcagataaatcgtactttgaagaatcaggggatttactaggtactcggaacttggaattcaacaggaataggatattgagatacggagtagtggtaacctttatgcacttgcacacttaagatatggtttcagctcattctcctaatggggaaggtgatagagagctattctggtaaaagtataccaagtaaaacgtatgctagttatgtggaactttacgtgagtccgattgtgctgtttcttggtgtctcatgtctgtttattctgtagttctgaggttgattttaatagggctcaaaatatgtgatgttattggctagaaatatgtcaatatatatctataactaaggtcgaatatcttcaacctattttcttgtcaacacatagatcattctatccattgtcccataataccttcgattgcaccatacactcgtcgggaaacgaaagtaatgtagaggttggtcccaagtcgagaccctgatagatgttggtaaatcctataaacctaatcagaaactgtcccctgaattggcgctccgcttcatccgatattaatagctcccagatactggagtccatgacgaggagatgtatgcatctcacatcggcacaaaatactatcttcagatgcaggttgatatgcccaaggaacagcttgcttacaatgttcctctagagcttgctcaagaggcagcttccagctacattgcatgaactttctcgcctcgacagaagcggaccgagctctacagcgtgttgtaatgatacgatgctactacatcattgaatcctgatttgctttgaatatgccgaacatggcattaatcctccatgcatgagacgccgaaccttgtccgcagagcattacgcgtcgccgatgagcacacaaccctctcaatgctactcaaccccacgagaagaaacggtccgttgagtggataagtttccaaaccctcgggtccattgtgcatggccttgaattgagaaccaacggtcttacactacgtaacctatcagggtcgaagcttactttgaaaggttctcgatacgcagggagtttcatgcaaaaataacaatcgcccaggtggagattcacggaatactccgtaccatggttgaagtatttggattggctgttcagatcatgccatatgctgtcagtacgcctcatccgagaagccaaaggattgtgatcgcatatgtacaacatacggagtactctgtacgaggtatagcattccataaagtccatatgcgttgggaaacatcgtacataacaaagttttacctctaaggagttagtcttgaaagctggggttaggaacgaggctgcatgccatgcagtaatatatcaccgaccctcttgtctatccacacttacatcaaccacgggacttcattgccctgttttggccattacgtgtatatcatgtgtactccgtacaacatatgtacctacattgttgtatgctgttaggtatggtaccggggacgagcgccaggatatccgattgtggaaagtgggaacttggaaaacccactttagagtagctcgaaattaaatatattaaaaaccgccttctagaaccattttagcgcctattgattagagaataatagacatcttttccggttgtctgaaagagttccatggatgctataatagaaacaacatggaagataacaaaagtgtctttcgtcactctggggctgggcatctggtctcgttggatatcgagcatatggaccctatcgttcattcttactgagacaaggttgtcgggtttgcgcatatcggctccccgaggtacataatgcagtagtttttggatccccttactggttcaagctaggatatccttgatcatttattgaatggagatagtaggaattcagttacggagtacatataatgtgtcaaatctaggaaacttgcagctcggagatcccatgtcgttcttcattgcaaattgatagatgtctccatgtgcctaaccaccaattaccataattgaatttgtcttttgtgggccttagaccagtcttccacggagtattttctaatattcttgcctctgccatcaaatttgaggctatccgtggaactacttggtaaatatacaaatgtacctaagcaggatgacagcttgaacccgtatgggcaaaatgtgaccctatcagcatgcctaggtacacccggctgttataagcgtgcatatttcgtcacacgcagacacacagacagtggggaacgtcatgctgtgaacgaaagacgcagaaccaagtatgtaataataaattagtctggggctctagatgtctccaggaccaacacacggacagttgcccccattagtccaaggggcccagacttggacttcctaaaagctatgtcaaatgcaatttagagtcacatcatgtcaaatgggatgtggtacctgtaagactgtagatatgcaagtctataattgacagtatctcatcttggtgtcattggacgtcgtgttcatgcaacgatagaaacattgaatatttcatgaggatgtatagtattgtaatcacatggtatctttccgctggatccccctcaaaacagcctttccatgggctccatcgtgtattaataccggtattgcatgcgcccgtcccgcctccacctggtgcaacttcccctaattcaatcccacttccatttccccattgcctttgttataactcgttgatggcataatccgctgtgctggattcttgttctttgactacgcaaggtcttttttcagtctgggtaaaaagtgactctgcttccctcgcctcaacgtcgaatatagtcatgagcggatattgagctcaaaccacccccccccctcaacccctccagaagctctctggactgtggccctgtgagtcaccgatgtttgggattcgcgcggcagatttagctgtcgacactactgcgctggccaaatccggatctgttgcgaccgcattcgagtacaccgacgaacaagtgaccacgcccacagccctatcccgctatcgcggtcggggaaacagtgtatcacgagatttcaaccacatcaaccattccccgagcaaaatggcctctggatatgcggtcagcccggagccccccgcgctcttcgtacgggccatgtacgactatgatgccgacgatcacactagcctgagtttccgccgtggcgacattattcaggtcctcaaccagctagaaaccggatggtgggatggggtaatcgatgatgttcgaggctggttcccaagtaactattgtaccccactcacggaagcggacgatttcaccaaccagttcgcacacacccaccttgaaaccgagctcggcgcggactctggactcgaagatgaatatggcgatggacatgatgaggatgaagtgcactccgatgacaacgctcgagacccacagccgattcttcctatggagggagtcgcagcgcccaaggagcaggaagaggccgcattctggatcccccaggcgacaccggacggccgtcttttctacttcaataccctcaccggatattccactatggagctccctttcgaaaacccgaccgcaacaatcgaacccggcccacgagatcgaaataatttctatgtccccgaccagacacggccacccccggagatgatggcccgtggttttgagcgagatgaagacgagtacgatggctctgcatcggaggccgaaggagaatcattgatgttaggctcgcatggctcgatttctcgccgacgccagtccgtgatggacgggatatcccccgccacgtctatggattcgttgtacgccccaggatctaaagatttcaaaatgccgcacccgccgaacaagcgcccgcaaaaatcatacagcctgggcggaaacagtaccagtacatctatgaccgaaagctattcgagaccttctatttcctaccctcctcagcattttgtcgacgatggcttcgcaccaccaataacctggcctttgcttgtggataatatgcgccacgccgtggaatcttatcgccaaacgcttttcaaaggcgagcgtgcagagtatgtaagaaaggccgaggacatatccgaccatcttcgcatgctgcttgctgctggatctgacaccacggataaccactctggcaacccatctatcatttccacaaacaaggccctatatccttatttccgggatatgatgtccaaattctcgaagctggttctttcatcacacattgctgccgctgattggcctggtgccgactcggccaataaatgcttgcaggaggccgacggagttatgcagggtgtgtatggctacgtggaagtggcacaacaacagcgcggagatgtgattcatcgcattgtgcctggcttcgtcagtggtagctcttccggtggtagctggcagaacaatggtgtttctttgcatacttcaggtccaacatcattccttgtcccggatggagactcgcgatcagagccttcggtctctcttgacactgcgtttttggattcaatcgacatactcaggagatcttttgttggtagcatccggcggctagaagagcggctggttgtaaaccggaagatcgtcacagcgcaggaacatgcagatattgcggatgcaatctccgctgctgcaatcaaggtcattgaacagtttcgcccatggatctcttctgtcgagtcgatgaatttagctccgttggggaccagcttccagaacccccagctagtagactttagcttgcaaaagcagagagcctacgatgctattggagatttcgtcctgagctgtcaagcagtttccgcccctctggccgatgagtgggccgagcttcgtggtaattctctcgacgatcgtgtgaatgccgtgcgaggcatcgccaggcagttggagaactatgtctcccagattggtttctcgctgtcgctgctccttgagcaaattcccaccgagccagtatcatctctacgacgtggtagccgccaggaatcggatgatgagtcgttcaagaagatgcatagccgaggcgagtccatggccaagattgcagagtcaatcggaattccatcctcctacgcccctgaaaaagaaggtggcaccgataaagtacgaagaaatatggacaaggcccaacgattctttggccaggcacccccaacagctatcacgcgagagccaatccgtgagccagtccgcgagccagaagagactccctggttcttgaaaatggcccatgaaggcgaagtgttctacgataacaagggagacctgccaatcctcaaatgtggaacactcgcgggattggttgaacacctcacccgccacgataagcttgatgcatccttcaacaacaccttcctcctcacctatcgctctttcacgactgccaccgaactatttgaattgcttgtccagcgatttaacgttcagcctccatttggcttaaatcaagatgacatgcaaatgtggattgatcggaaacagaagccgattagattccgtgtcgtcaacattcttaagagttggttcgatcacttctggatggagcctaatgatgaactgcacatggacctcctgcggcgtgtccatacttttaccagcgactcaatcgctactacaaaaacgccaggaacccctacattattggccgtgatcgaacaacgacttcgaggacaagacacaaccgtcaagcgccttgttccaactcagagcaccgccgcaccaacaccaatcatccctaagaatatgaagaagttgaagttcctcgacattgatccgacggagtttgctcggcagttgaccatcattgagtcgcgcctctactccaaaatccggcccactgagtgtttgaacaagacatggcagaagaaggttggccccgatgagccagaaccatctcccaatgtcaaggccttgattcttcactcgaaccagcttactaactgggtcgctgaaatgattctcgctcaaggcgatgtcaagaagcgtgtggtggtcatcaaacactttgtgaacgtggctgatgtatgtattttctatatctatttgatcttgaccttactaactcgactatacagaaatgtcgcaacctgaacaattattctaccctgacatccatcatttcggctcttggaactgcacccattcatcgtctaggtaggacatggggccaggttagcggacgcacgtccgctgttttggaacagatgcgtcggcttatggctagtacgaagaactttggcgaatatcgagaaaccctacatctcgctaacccgccctgtattccattcttcggtatgcatcacaaccatttcaagcagaatgtcttggagcatctcacccctttgatttgactaacacatcgtaggtgtctatcttacagatttgaccttcattgaagacggcattccgtctctaacaccatcagaattgatcaacttcaataagcgggcaaagactgcagaagtcattcgggatatccagcaataccagaatgtgccttatcttttgcaacccgtcggcgaacttcaagattacattctcagtaacctccaaggtgctggcgatgtacacgacatgtacgaacgaagtctggaaatcgagcctagggagcgcgaggatgaaaagattgcaaggtatgctgaagcctcaagcagagacaagagctccttgttgtttgcatccaccgttgctgttttgcgataatcttgtttttttctttttcttaaaaactggcgtttggcatttgcccggcgatacccaaatttgacctattctcttttttttgggggccaagacaacgacaactctgctttcttttttttctttctctcaaaactgttcggctgttgagactaaccgttttggattctgaatctcgtagattactatctgagtccggcttcctgtaacccgtgaagatccctgtcgagttacatcccgcggcgccaccaaacaggttcgacaaatgcgccattcgcgctccaatcgacgttcgtgtttcaccacctcgtgaccgttcaggctatcctagtctccacaccacctcaccttttcacctctcagatctcacttttcagggatacttgcaggttgatctatcgcatgcatgtgaatgtctcaaagacccacacatgtgaacacttattctcgatgcagttacattcggtctcggcatttatcattgcaccggcgaatacggagtgctccgtatattgattctcgatatagcgcaatagagctgtttgattggttcggatttcttgtttattccccccttgtttccttctttcgtctcttatctccccgatgaggtcacctgcctctgtggccatctcgaactcacctcttctttgtaccgactgtgacatatcctggccattttctcggcgtattttgccttggatttcagtttcatttttttgtttcctttttcaacatatccccttgtgttgtcgccaggttagggcgacctgcttttttcttttcaggcctttttcctctacgctgtattctgaataatgaacgtcacgaatgactcgagacttttgttcctgtctgatcgatgttacccggtggagttgacttggtacttttaacttcattacatacagtgttctactacttgttcgattcccgcccggaatattgcgtattctgcgccaatagagattgattaccttggattgtcttagattcttaggctagcggatttactaccgtggacaccaccctcagacagggccagtatttgcctttgttgcccttgcttgagacggctacaaaaggtgagacatgaagtcgtaaattcattcatttgcaggaactgcaattttagatattctatgatcatggatcgagaaagatcgccgcacatagcaagccccgagaaattccagcgaatatggtgatatcaacccgctgagctccaaatacaacagttcaagctaagtaaaaagcgtggcagtcatgtcaatattttgggatcgtggacccctcatcatatgagctggatcactctgtcgaaggagtttggtttccgatgccgtgaaacagtttcatctttgtttcggatgctatgagacccttcacttcctccgcaacaacccgctgtccgccgcggacaaccttatccagctgttgatctttgctgttgacgccacccgccctcccgcccgggggcccccnnnnnnnnnnnnnnnnnnnnnnnnnnnnnnnnnnnnnnnnnnnnnnnnnnnnnnnnnnnnnnnnnnnnnnnnnnnnnnnnnnnnnnnnnnnnnnnnnnnnnnnnnnnnnnnnnnnnnnnnnnnnnnnnnnnnnnnnnnnnnnnnnnnnnnnnnnnnnnnnnnnnnnnnnnnnnnnnnnnnnnnnnnnnnnnnnnnnnnnnnnnnnnnnnnnnnnnnnnnnnnnnnnnnnnnnnnnnnnnnnnnnnnnnnnnnnnnnnnnnnnnnnnnnnnnnnnnnnnnnnnnnnnnnnnnnnnnnnnnnnnnnnnnnnnnnnnnnnnnnnnnnnnnnnnnnnnnnnnnnnnnnnnnnnnnnnnnnnnnnnnnnnnnnnnnnnnnnnncccccgcctcggggggggggtggcctccattccacgtgcggctttgcgcactttttgactgagatccatgatctgcttgttaccgaaatcacgagaggtgaatagcgggctctggctgagagtcgcgacccagtacttgttccatagaagggacaatatttccgtatcaagggtgcttttgaaatgactgacatcaagagagtagtattgattggcatgcgcaccgaagtcttctgccttcccgagcggaatagtctgatactcgtcatcctcatgagcctccttctgcggggtaaagttcgatggaaatgtgcggaaagcgccgatctcaacgcgacccgcggagatggtacggtccgggtcgatgacaacggcgacaaacggtccagtcatttgctgtgtttgttgagtggccacatcaatcccagacagccagcacccataacccggatgactgtgataccatccgacagcattctccatccgccccgagtctcgacacgactggagatatgataccatgtactcgtttgcctcgtcctgcgcattcactcgggtttcggtgccttcgactggcagccggaacgcatctgtcaccacgaaggtgttcggtaagatgtagccttgcatcagacccataatctctagtgagccacccgagcgggcatgcatcaccatcttcaatagtgccgaagcggagattcgcacgtgcttgaaatagtatgggtcggtggcccatggtcgctcctcgttgagggctttttctgtatcggcattgtattcgtagagggcatctcgttgaggatcaaacacgcttatcgcattttccagctctgtgcggggacattagttaattacaagctggctcatatcagtatggaggtactcaccccaggcctgctgggcagcctgcattttgggtggatgggatagagaagacagtcgaatggtaagcaatgtatcgcaaggatcagagtactttaaggcaaggactcgggtgataatgtgagttctgcaaggaccggagaataaatagtatcagggctgaatgcatgaagtagagaaggccgtggggttgttcattgattggcagtatcgggcggtggggcttgctgagtcagctgttgcccttgacgacggtctcacccaaaacaccacccacttacgccttacgaaacttgatgttatctatcatctgcgatctccgaacgcccccccccctctcataaacaacagtgttgttcgctttcctatgtggctgccctaagtgctttcgcaaacctccactttcgtttatttccgtcgcaccttgtgtgctgagaaccctgtgtgtcaggctctcctgttttgatcccgacattcatcaccctgtcgcagcttcgctcggcattgtatcgttcatacaatattttgttatcaacctcgacttttgtcatctccgttaagggactttcattacaatggcggtagataccagctacctgaccactcaggtcaacaacatcgtcgcccagctccatggtatttacgacgaaattggagttcctgcgcgggagcgcgagtctcgtgaagcagaggtaagcttgctctctgatataacaatggcattgtcgcgtggctaacagagtgatacagctctttagcgccctgtcagagaccttgaacaatcatctgaaggttgttgatgagtgagtcgcatccatagacagacccattggaggcttgctaattatatttctagggagagagaagatatgacgcaagaagcggaacgtctcattacagctattcaacaaatggaatcgtccctgagcgatgaacgggccaatggccaatacgagcttaaccgcgacgaccttcgtgtcacttacccacttaacaaatgtattgcattcttacgcgagaagaacgactcgatgagcaagctgcatcgggaacgctttgagcaggttaagagtgagtcttatctgtgtggtgtgtcgctgatgctcctttactgacattcaatagaacttgtggacgcgcttgaatcatactcctctcacctcgagccatcatttgttaagctggaccttcctcctactgcaccagggtcctcgattcccccaagcttcgacctttctcctatgtatgtgaccgcattggatgccgaattcactcatgtctacgaagagtaccaccgccgcattgccaaagtccaatctgcctgtgaagaaatgatcaagctctgggccgagctcggaacgccccaggcgcaaacagattccactatcgtgaagtgttatcgcgattcccctgagcaactggggctacatgaagatgatgtcgccaacctaatttcgaagcgcaataaattggtggaagaaaagaaaagccgcgagcgcaagatcaacgacctcagagctaccgtaatctctctttgggatcgctttggtgtggaggaggcggatcgcaaggcattcctggctgcgaaccgtggctgcggtttgcgcataatcaacgacctcgaagaggagttgacacgcctcaacgaacttaagagacagaatctccacctctttgtggaggatgctcggtgccgattgcaggaattatgggacactcttttcttctccgaagaggaaatgctcgatttcacacctgcattctccgatgtgtgcagcgatgctttgcttgaggctcacgaggccgagattacacgactggaagctcttaaggagcagcgcgctcctactctcgaaatgattgacagacaccgcactcttttgacagatcgcgaggcacttgaaacatcaagccaagatgcatcccgcctcatgggccgcgggaacaagggagagaagcgtgatcctggaaagctcttgagggaggagaagatgcgcaagagaatcgccaaagaattgccaaaacttgaagctgacctacggaaggagttggaatattgggaagacgaattcggccgacccttcctagtgcacggagagcgatatcttgatttgttgacacctgtaaagtcaatgcttccaccacgctcaaagacaccatctgcaacaccctcagctaccaaagcaagcacaatgagacaaaacccacccgcccgccctgcaagctccatgagaggcctgcctcccccccgctcagccaccaagactcccactagcagcggcccagttaaacacaacaccattggctacggtgcctctagagccggtgccacctcaagagccggtgcaacatctccttcgaagcttcccgcccgtgtcccgctgggaaacatgccccttggaaccaactcccctgagcgtcgtatgcagcccggtgcctactcgtctggtacacttaatggaaagatgcagccccctcgcggacctcccccacggatgcgtgcgttgacgattgagtcaagggaagaccgattcagccaccttatggagccaccgcgctgcaatagcgccatgtctagtgcctatgtgcggcctgttagcccggaagacgtttatgatgaccggcagcgatctttcatgagcacttcgggattctccaactctcaaagatctactggattctcccattcatctcactcttcacactcgtcactgtctttgaactctagccaagtgttcccacgacctaacccttacctacaccacgcagctccaccgccagctgcccgccaagtctccaactcctctacagtcaacacaacaacctctggatctgaaaattgggagactttcgaggacggctcgggatcagaagccgatcccagtgacatttactattccaaactccgtgccgcaaacggagggaaacgatttgcacccgaggatggatcggatctcactggcaaaaagaccaagggtattcgcagtgtcagtccagaaggtccgcatcccgggcaggtcctgcgcgttgctggcagtgacaccgagtgggctgatgactacgaaacttattaggtgttctgccattgcttccctctccataatgcatcccacctcttgcacctcatttctcggcgccttggaagttcaacggtgttacgcaaccgttgacctttgatgatcccacgactgaattttgcatttgcacggttcatgataatccttggtttccctttcatgactgagcacccttagattccttatgggcaggtttctcctctctctacacacgctaattcccgaggggccgacattcaacttcttttcctgtccataattacgagtttatcatgtcaatcttgctcccgctctccttcatctcgatgatattgagcccaaccctgcgcctgactgtgtcaggctgcagccctctgaggattcctgtcattcacgcctttcccgactgacaccctcgctgtttcaattgccactgagtttaatcttttgctttttctggtcttcttggcatggtgttatctttaattcctttctctgtcacttattgttttcgttggcttggtgcttaaggctcgtttattcccttttcgatctccggttttgggagtcggattttgtccttggttttcaccgtttttctatgtatttgtcagcgaagtacgccgtacagtgttttgatatatctagtgttgttaattttatcttctggttgttcaaccttttgttcaattcgataaatagcatggatagatcggtgcataagccgagacacttgacttaattagggctacccatccacatgactccggtaactaggacgacttggattgcagcccgaacaacaaggcaagagataatatcgccgctcacaacggactccgtacggagtgagcggtgttagcggtattcgtcattaggccaccgtcaaacaagcccctggtcctttgggctcagtttcatccctcaaattcaaattcaccagaagttgttccaccacagtagctgtcatggcaccgactgtggttggtgacacatgtgacagcctttttgggcctgtgatcagtcaacatgattgtcgtggagggttcgactttacaggtacatatctccaatgtctgggcgcctgggcagtctccacatatactgacatggaagcaagttctattcgaagcatggatattcaacattaccccagcagtctgttttctcctgctgttacccattcgcctgttccagctatctagagagtctttgaaagtaaaatcctcgttgactcattgggcgacgctggtaagtcttgctatcacttgtcggaccttgaaacgtctaaataatgctctatacaggctattgcggtagtattgtccggaattcatgtcgttctgcttgtgtttagtgcgacgcagcactaccccgcacaaaatgtgtcagttgcgggtgctaccctcagccttatagcggcaatttctattgttgttctgcttcatttagagcacagccgggctgttcgaccctccttccttgtctctgcgtatctgcttattacggtgcttctagacattgcgcgagtacgcaccgcctggctgttgccatatggtagagcatacccgacctgcctcaccgcatctctggccaccaaattgctcctcctggtgctggcaaatatcgaaaaacgcaaatggctgttgctatccgaacagtctaccgagagaactagcggtatctttaacaggggtttattcgcctggctcaatgaattactgagaaaaggacacacctcgttgctcaccagcgatacgctacctaacatccatgagaagctatcgtctagtgatttagccgaccgattttcgaaatcatgggcgctatgcgaccagagtcgtcagcatgcgttgctgctggccgtcgttaactgccttcgctgggatattgctgctattgctcttcctcgactcgccttgataggatttagcatagcgcagccattcctggttggcaagaccgttacattcctcgagcaaactgaatcctcgatgaatattggctatgggttgataggagccaccgcgattgtctttatcgggattgctgtaagccttatgtcttcaaccacttatcccactatccgatggtcattggccgactgagtttatgacttaggtcactacggcatcttatgagcacctaggatttcgtgctacgaccatggtgcgtggtggccttatggctcttgtctatcagcacatgatggagctgccactggggagcaccgatgagtctagtgccatgtcccttatgggagctgacgttgaaatgcttgcggagtactttcactctacagtgtgcgaatcttgggctagtatcctacagctgggactggccgcgtggatccttcaaactcagatcggtgttgtttgtatcacacccattctaattgcaacaggtactttctctttctctacctatttgcacgagatgtgatgaccataagaaattaacagattgactagcttttaccgttgcttcttttgccacgggcaatgctgtgtccgttcggcagaagacatggctacaagccaccgagaaacgcattaatttcaccagccacgtcctcggctcaataaaaaacgtgaaattcttaggactaacagagatcataaagaaatccattgaaggcttaaggattgaggagcttgagatctccaagaagttccgccgaatccaaaccgtccgtgtctgcatgagtacgtatacttggaagtccatctacggatagttttattgaaaatatcaggatcaactgaccagtctattcagtaaatcttccggtgattattgcgcagtttgccactttcgcgacctatgctgtagttgcgaaggtgcaagggtcggagggtctttcggtctcacaagctaccacggccctttcactaataaatctgctaatcactcctctcatgcatctattgttggcagttccagatgcattcgcatcaatgggatgtctgtatcgagtccaggacttcttgaaacgtccaaatattgtcggtgagtagcgctaatactcccatacgtgctactcagtaagacgtacagcgaattaacctcatttacgcacagaaagaaggaaattgctccagtcagaagcagaagctctgaatttacctactaattcattcgaattcgaactttctaactatcccggggctaggggaatttcctcgccagagaatccatctgacgtgctgatctccctgcaaaatgcctggtttggctggaatgacccttcttcggatagtgctggtatcacactcaatctgagcccctcgcagctgggtaccctagttgcaattgtcggtcctgtgggaagcggaaagtccacgtttctcaaaggcctcgcaaatgagacgtccattctcaatggtgacgccttcatcaagtacccagatctagctttttgtgagcaaactccatggctaaccaatacgacgatccgggaaaacatcattggggagaatggatccgctgcatttgattctgattggtattcgaccgtgatgaacgcatgtgcgctagattccgaccttaaaaaaatgccagcgggcgatgagtcgttcgtcggtagcaaaggatctaagcttagcggagggcaaaagcaaagaatcgtgagtacaaaccatctttccctctatatgggcggtccggcccggggataatagcaatggatttgtgaactgattttattataggccatagcacgagctgtctatgctcgcaagcgcatcgcgtgcttcgatgatactctgagtgctcttgataattcaaccgctcggctggtatttaacaatgtctttggcccgtccggactgctgcgtcgactgggctgtactgtatttctcgcgactcacaatggtgcgctcctcaaccctcgatatctttatcttgtcacttgtgtggtatatactgactattagcagttcaatatctaccccaggccgactttatagtcgtactcggagagaacggcaatatttcggaacagggcaccttctctcagcttctcagtcacgccgggggatatattaaccggctaggtattcaaccagaacagattgagaaaggaaagatgcaagatgacattccaactgggcttccagagactagtgaagtcataacaagccgcctatccaccccggcctctatcgatgaatgccgacagacgacagatattgctgtttacaagtactatttatctgctatgggctggttccgagtctttgtgctgagtttcttactggtggtgaatggtggtattggtggattacgaagtatgccaaaattctcgactaataacaatgctgtatgatgcttatctttgcataggtgcttggattgagatctggtcctctagcaccgacagcgcttcaagctcgggattaggctactggcttggagtatatgggacattgtccttcgtcgaagccacttcaatggttcttgcggtatagtaagtgaaaaaaaaaaaaattcggttaaagcttccatgctgattgggttctatctaagttggacctgggtcgtcattgtaccggccgcgtcgaaaaatgttcatgctactgtgctgcaaacttgcatgaggtgaaattccagttcttcactaatctaaatatcggccaactaacatattcagtgcccccttgtccttcctatctcacgtagacacgggctctctcatcacccgttttagccaagatatgaggctagtggacatgatcctcccccgaggttttatcacgacaggattccgtaagtgcattcattatacatttatttaacgtgtttctctaacccgagagatatgaagaactctttacggtgctttcacaggccgcaatcgccctagctgcattgccatatctggctgtagcccttcccttcctagttgggatgttagtgctagtccagcgcttttacctgcgtacatctcgccagcttcgactgctagagtatgtttatctgtgccaacaacgctttaatttgatcagcatgcttgtgccttttagcaaactgacaaacccttaggatcgagctcaaaagccccctgtacacccatttcattgaatctctcgctggtgtagttaccatccgtgccttttcatggactactgcttctacgtccaaaatgttgtacttacttgatagggcgcaaaggcccttctatcttctactgtgtattcagcaatggctaggcctggtactgaagctcatggtgactggtatgacgcttattctcctcggagctgctatagctctgcgcggacaagtgagccccggtttgttaggtattgcgctgattggaatgatggacctgggggaagtactctcatacttgatccagaactggacgcttctggaaacctctttgggtgcgattgccaggattaaggatttctcggaagatactccaaatgaggaacaagatgcagtctatgagcagccaccagacgcaaaatggccaagtcggggtgacatctcattcgttggcgcagatattgcatatgagtctgagaacgcagagcccgtgttgcacggtatctgtctggatattcgtgctggggaaaaagttggactgtgtggtaggaccggaaggtgaggaaagacacttcagtaggggggagaataggctgactctcttatagtggcaagagcactctggctctatcattactccgtcttaacgaggtggtttctggccaggttcttatcgatggggtagacatatcgacggtgcctcggtcattgattcggcaccggatcagctctcttagccaagaagccttccttttcccaggtactattcggcagaatgtcgatcctttaggcattgccagcgatatcgatattattgaagctctcaaatgcgtcgaaatctggaatgctcttatgtctgcgacgaacagcgacgcccacagcggagggttgctagatgtaatactgactgacacgactttgtccgaaggccaaaaacagctattttgcctggctagggcgcttctcaagaagagtaatattctcatactagacgaaccgacaagcaggtatgtaatttctgtctttttgcttctggcaacacatgattatgcgagcaatgccaaccattcacaatcaagtctggatgcagagacagatgccagggttcagaaagtcattcgccaggagtttcagagctgcactatcattatggttgcgcatagagttcataccatgctcgactttgaccgagttgttgttctggatagtggtcgaatcatagaagagggacatccttcggacttgttgaacaaggaaggcgctttctcaagtctgcatcatctgaagcagtcaacaggaagcaatcaggagctctgattgatgggtctcatcaagttgttcacaaagacttacagcttttagaccgcaatacactttgtttttccgctctatatcagtagacaaatcatagctctggggatcagggcatctgctctttatagagttatttaccgcaacggacaacctgctaagcaagtgattgaaggcatcaatgtcttgtcttcagcaaaaatattggaattgggtcatatcggatacagctatagtacagtcactcaacctcttaattctacattaccggctagtcgcaagagtccccatccaactctgatcttcaggcaaagttcccttaggaactctctggccagcagaaggaacaagggactgtgtcaacgccttggcgtcctgcactcggcgaagtgtctcatctctcccaagaactaccatagtctctgagattccaggcccaggcgcagaagccaacagcgcccagcggaggtagtgatacagctccttcttgaataccttccctgcgttcttcgaaccaacgggtgtctctggctcagacgtggggaaaacaacgctttccgcgccttcatagctgttaatgttgtcgcggtgagtgtcgatattccaggccgcggatgggacaagggttaaggcggctgctgcagtgtgcagcgcttggattgggacttctggggaggattggggtgaggccggtttgtaaggagctctgtccagtttgggggtaaagaagttagagttacgctgggcgaactcctttgcgtttgtgtagttgttgacatctgcgcggatgaggggcgcgatgtattcggagagagtgcgaccgttgaggatcgtggtgctgctaggtgtcagctattaggtactatgtaatacacgcgtgaattctttacggctggtggctgacttacagtttgtcgagagggtagctttcttccacgaccaagctcaccttcttcaccatctcgtcgaactcaggtccgccgcttttgaccaagcgttggacatgtgccttctggaggaactggagtttttcaaaggagacaaccgtatttcctcgagtaattttcaaattgaactggtatcaatattagcagggaggttggcgtgttttcgggggactaagaagaacatacaatctgttccagttccttcagacttaatacatcagacttctcggaatgcgaccagcctagaagtgaagtgaagttcaccaaggtggatgggaggatcccttgcttgtccttgaatgacgagaggtcgatatctgcgttgcgcttgctgagcttttgcccacttttgtcgacgagcaaagggacatgagcaaagcttggtggcgtccatttgaaggcattatatagcgccatgtgcataggtgtcgatgacatccattcctgatagacgttagttcagtatcttgtgacttgatagctacagatataataagtaaactcaccgtccctcggataacatgggtgatcttcatgcaatgatcatccacaacatttgccaagtgatacgtggggtgtccatccgatttgataaggactgggtcattgtaaacacggtcgatgaaatccagcttcgagttgttctggtgattctggccggatttgccataaaccagatcattgaacatggggtattcctctacttttagtcgaataatgtgtgcctctcccttggctgctcgatcttctgattcttcggcagatacgtcgccgcatttccggtcatagccaggcggcagtcctgcctcgctgcggtgacgggcgatcgaatccaatcgttctgcggagcagaagcatcggtatgcatggccattggcaacaagatcattggcatgggactgatacaaagcggttcgttcggactgcatgggagcaaatattagagattaatttcttgcgacaaaggagtgatgcctcacttgtctataaggtccatagggtccaccaacgatgggacctgtcaacgaaacgagagtcagcaatttccctccatttttagataagtttcaaactgaccttcatcccagttcaatccggcccattggagatcatcatagagtcgctgttccgccccgggaattgtccgtttctaccgtaatcagtcgtagtccacgcaacggagcgcaatccacgaacctggtccgtatcctcaatgcgcaacagaaattgaccaccggtccgcttggccagtaaataattgaagagagctgtccgtagggagcctagatggaggtatccggtgggcgagggcgcaaaccgcgtgcgcgcagggccattcggcagtttgttcttcaagttaggtgcttgagcagccggagaagaggagaaggctctacattggatgatccaagatcgcctggcgagtagcccttggggacatctcattgcgaaatagaggaatggccgatctttctgatatgttgtggagttgcggagttgcggcgcggagctcccgaacaaaatttctcaacttctttggatcaacaactcccgctctcacttctcgttcaccaacctctctcttttactattgggctcaagtcaacggtctttttctattgaagaaaattccgatcgtgttttctacaaaataatcactgaaaagtacgttggaaagttgtgtgtcacttgagactctactaacaatgttctcagtggctgcggttgaagttgacctctacggtgtgtgctcatttgcgcagatcaaccatacaggaataccatattaatcagttattcattcatacagaggtcctagagatccatgaaagctcaactaaagatgatatccgcaaggcataccgcaaggcaagacgaacccgatcgtctccggattccagcgatactgacagccggctttccaataggcagctttggccaaccaccccgacaaggtccccgaatccgagcgcgaggaagcttcaatccggtttaaggctgtgcaagaggcctatgatattctttacgacgatgacaagcgacacctctacaacacacacggcatgtctgccttcaacggctcgggtgagccgggaatggcaggacaacctgacctagatgacttgctggcacagatgttcggcggcggcatgggcggtatgggtggtatgggcgggatgcctggcatgggaggaatgggaggaatgcccggtggtcgccccaacaaaccgcgcaagagccccagcgaagaacaagattacgaagtcagcctggaggatttgtacaagggcaagacagtaaggttttccagcgtcaagaacgtcatttgcggacattgcaagggcaagggtggcaaggaaaaggccactgccaaaaagtgctcgacttgcggtggccagggctacaaggaggtcttgcagcgcatgggccagttcgtgacccagcagacggttatctgtaccacatgtaacggagagggctcatatttcgccccgaaggataagtgtaagaagtgcaagggcacgaaaacaaccgaggcgaagaagatcttggagatctacatcccccgaggcgctaggtaagatggcctttttttctatctaacggaatcacatgcttactgtgctctaggcaaggagaccggattgttttggaaggcgaggccgaccaagtgcccgatcaagagcccggcgacattgttttcaaagtcgtcgaggaagaacaccccgtgtttacacgagccggttcagatctgcgtgcaactattgaaatcactcttgctgaatccttgaccgggttctcccgcgtcgtgatcaagcacctcgatggccgtggcattgagctcactcaccccctcaccgccggcgctatcctctcacccggacaggtcctcaaggttcccggagagggaatgccgatgaagcgtgtcgattcccgtggtgacctgtacttggttgttgatgtcaagttccccgataacgggtggaagcccacctcagagatgctggagaagctcaaggagattctccccaaacccagcgctcctatcaaggccgacaccgtggacgaagttgaatacgaccccaagggtcagatcgaggacttcggtgcgcaggatggccaggacgcagcaggatgggaagacgaggaagacgacgatgaaccggcgcagtgcgcaactcagtagaattcttgcatagatggcgtctgggggtttgaattaatggggacttgtgaatagaacaaccctcttggcttaaaaacaaaaatacattgtataccaatgtaatcgtctttgcagccccacccgcgttcacgggctgcgtctattttcattattatacatagttcgaaggttagttaagagataccaggttattgaaatatcatcaccaggtaccttttgtatgcgtgtaccatataaaagatacctaatgtgtgtacctataataatgaaacagccgggtgaggatggaagacgattacatcgacgtacaatatagggaatacggaaccagttccgctcattttatgagtggacaggtggatggaccttgtacatattattcagatctatttatgtactcgtcggttttgttttgtttttttttacaaatgagatattcaacttatcccgaggccacggaaagaatccggggtcggactccgcggtcgcgatgtcggactggggtcggcctaacacctttcggcttcgatatcggctgctctttctttctttaacttggattcccccctctacataccacccactccaggcctagaaagctcacttccaatagtatatagtcgccctaatgaattagtctgtaatggaaaaacggaaagaaaaacacatggcaagtacacctgaattgacggattttccgagtgtgtaccgaggctatggtaaaagatgccggattcgtcgcgacgatctcaaggttcggggtaggttccctgtgtccgagaaaagcaccccgtggcaggagatcttccagagcgagactggtcggttgaatgagattatggttctgtctgcttgacgccgctaagtctgcacgatgctgtcgatcctacacgatgctgctgagtatgttgcgccgttggaagcctcgatgtaaacaattgaggttcaaactggttattgtggggaaaacaagcggctgtggggaaatgaactatggtaaatgcgggataacgaacagcgctattccgcgtgttgggattgtataccatccccacttgagatgatagtagctgctgccagggacgcactgtccaatcacctaagtgcattgggggcattggaagaagaggaggcaaccgcccgtatcggcgaaagcgaatatccaattcgccggctatagacgggtccagcccctttgccgagtcacttccccgggccggggtccgccacactttcctggttggatctagtggtaaccttatttctccgtggatataattcctgaactcgggggagactggtaatgccaacgttaaatagaaactgagtccctagagtctctagatatctaatagtaatggggctaataaggatatctcaaagggctctgatatagaatatagcactgtagaggcgatgggaagtatgtgtcttcttcttgattggccaagccttgttcttaattgggtaactcaattttccaagtctcccccagctttttacgggtctcttcaaactgtgacccgatcatttgtccttcgacgtccatataggccaggtggatgcagttgatggaccaaacagggacgtcacctcttcacgatcctccgaatgtcggaaattgaagagaatggggacgatggatccggggtacgcatttccgattttccagacccaattggaactaagacgatatatgattacttggtcgtatgcgggggtcgcggggtgtctgtgctctccagggctgtctctagggttataaaatctaatccttgtcccaacacctttttctctaccttcatactctggaaggaagaactgaacacagtccggactgcaaaatgggcatattcaagaatagccgggtctatgtgctcgccacagtggcatatacgggttcattcctattcggtaagacaaatctctaccattgccgatcagatgcagcatgctgataagtttcccgaaaaggatatgacacaggtgtgatgggaagcgtgctggaacttccaagtttcaaggccgattttggactcacaactggaggttctggtttttcgactgccaatgctgaagtctcatcgaatgtcgtttcccttctcactgccgggtgtttctttggtgctatcttcggcgctatagccaacgaacggtttggccgtcggtattccatcatgggattcctgacattcttccttatcggtgctgctgtccaaaccgccgctaccggcacgctagcctatatgtatgccggccgggtgattgcaggtttcggagtcggaggaatgtcagctatcaccccaatcttcgtgtctgagaactgcccaccggccattcgtggtcgtattgctggtctcttccaggagttcctcgtcattggtatcactgtcgcatactggctttgctatggcgtggcagagaccctccccgccacaaccagacagtggcgcatccctattgcattccagcttgtgcccggtggtctaatgatgattggcatgttctttttgaccgaatctcctcgctggttagcgaaagaaaatcgtctcgaggaagccatcgaagcccttgcatatatgcgctctgagccggtcacaagccttgtggtccagactgagatggcggaaatcaaagcggccgtcgaacacgaagtcgaatcaacacagggcctcacttggcgagaagcattcctacctggcaaccgtcttcgctttatcaactgtttcttgattatgttctggcagcagtggacgggcaccaacagcatcgggtactatgccccccagctgttccagacaattggagtcaccggcggtaacacgagtttgttcacaacgggtatctatggtattgtcaaggtgatatccactggaatcttcctcatcgttggtatcgacaaggtcggtcggcggtggtctcttattgctggcgctatttggatgtgcacaatgatgttcatcctgggtggtgttctggtgacctatcctccggatcctagcggtaacggtactctttcgtctgcatcgctcgccatgattgtcatgatttacctctacgtcattggctattccgcatcgtggggaccgattccatgggtttacatttctgaaatcttcccaactcgccttcgttcctacggtgttggttgcggatcggcaactcaatggctcttcaactttgtggtgacttatgtgactccctccgcaattggcaaccttggctggcgaaccttcatcatgtttggttgcttctgctttatcatggctatttgggttttcctcgtcgtcagggaaacgaagggtcgctctcttgaggagatggatgttctctttgagaagttccatgcccttggccgtttgcctgatattgaaattgcacaggaaagaaagctttcatttgatggtgctgctacctcggttcataatgaagtacagggtgttgagaaagaggattatgtgaagacataaagagtgtacagggcatgtttgtgatggtctgatacctgtttatgtatatagttgttttatggagtccaattctacgtctatttggttatgtgtgtgcataaacctagtcaattacctgtgtatattgatcgaaatcagaactggtcggcggaaaatatatcctctcagggtgcacgaacatctcgactagggtttacaagaaccttcagatgcgctcttacaacatatatctccaagaaggacaatagaagactcaacctatcgaaagttagacagaggtagctacgaggaataaatttcgcaggagatgatggattcaaatatttatccgtcacattcataatgtttaatccatgagagatggaaatgtttctctttcctttcctcatacttgctacctatcaatcaaaaatccttgactattggtaaactactatataaaggaaattgcattcgaaatttacgaataggaaatgttttctgttttgtttcgtgttattgctgttctctccggccgttcggggcagcattataaaagctcgtcaatcatctattccctaattccagagtcgaagccgttgattctctcaataacatattttatatcaaatttatatatagaaaagtatttagttgttgaggatcagatgagaaacaaacctcacggatgaatcaaaattacctaatcactgatatgccgaggtccgtgtggagagcatgttatatcaaggttcaagcataaacacatacacagatattgtagaatcacgcttgaaccaaatcaaaccatcccatcaggaaaataaaatggccaccgcagagtccaaagctaggaggcaacgcaagcgcagcgactatggcttccaccaagtacaccagacccgatggtcagtaccagaaccaccgaactagcagccacgaaagacaccgacactaacacccacaggttcgacaacgacatgtacgcacacctcaataacgcagtgtacacgcacctcttcgacacaattgcgaacacgtatttaatccaacactgcgggatggaccccttcagcgtgaacaacccaaccccagcgccgactcacggccagccctccaatttcccctcgccatcgaacctagaaagcaacgccaaccaaatcggcctgattgtctcgacacaggctgatttctttggctccgtgcgcttcccggatctgctggtggtcgggctgcgcgttaataagcttagcaagtctagcgttacctgggaagtgggtattttccgtgagggtgaggaggatgtgaagatggttggaacttatacgcacgtttttgtgttgagggagactatgcgggttgggaagacggggatggaggagcggactagacggggcttggagaagttgcttgttagggaccaggcgaagttgtgagggggttagaatgtcaatattggccgctgggctgggcttgtacatagttttcttatcggaatataggtagccccttgcattccagggcagtcgtctgattgtctggttatagatagggattctaacttgagattgatcaaatggtccctataggaattcgagattcgagagaaaataagcgagatatagcaagacaccttatcttgatttgtatggtattttgtcttaggaatgtgagacgccgtgaagaaaagacaaaaacgtgccccgtgtagatcaagtagatcatccaaaaaaccctagatcattaaaagtctaatctaacctgaaatctatgagccaaaagaaaacccgaaaacatatccgtcgccgtgaccaaaaaccggaaccaaagacttttgtggttatcatgagaataaaagagacacgctaaatcgcttcgcaatatcaaaacaacagaatggtaatacaagtatgatgaaagctcaatcataagaaggattgtcatctgacaacctcaagagttgtgggtgagacaaggtgctcattcaaatttgccagcaatgatgctgctgcaacgggacacgctgacactgctcggaggcgaggcgccgcggcggatggtgtatccatcttcatcgagccaccacttggggtaagggccaagaatgaagttgccctgagcatcccagccagcgacccaatgaatgccgtcgtcaaggaggaaaaagcgaagcttttcgggacggccgcccttgtgcagcggggcgtcgaaccagcggcagcgctcctccagttcggattcaaacatgtaacggtggaggatgcgacagtagactagtgcagcagggactttttcatcgttttcgcacccatcccgatggatgaggtgccatccgcgacctttgaggaacttgtatgttcccgggacgggggaatcccagtgttgttctttgagattgctgtcacggtcgcccttctggaaccagtaggtagggcagaagatggtgcgcgcacagaggaagaggttgggtgccatgattgaggatggtatcaatgaagaaaaaaggttatgtgcaaggataacttgtccacgaaaatcgggggaggagtccaagttgatatagaaacagcactggtgtacaaggaatctgaagggctagatcgggctataagtcgacagccatggtgaaaaaaataataaaatatcaatcgggtcgaaatccaagttgagataggaatttgacgggtcttccgcgttcacgggagcttggtcaaggaccgagaagaactttttcaggagacaaagaatgcagaagggcacacttggcacggggttgtgatccgaggcaaggactggttgggaatgtccagttcaaacagcactggccagacagtaaggtgtattccgttatcgatgcggtgagcaggggttggagtgttttaagtcgggaaaaggggtcgtgataagcttgtagctttacacgacggaacagcctttgtgataggaaattgaggagggagggtggaaggcgaatagggagagttcaacagagcttggacgtgcagcaatcggcaacacgcagtagcacgcacaacgggtgttagagctcaaccagagcgtgtgctagagatagggcatttaactggaggaatgtcgccatggtgatgtgaggaagatatatataaaaagggaaaatacgaaaatccagaaatccggaatgtgtgtttggatatatttggcggtcagatgtgtaacagggaaaaagtcaatcgacccgctggacagccacaactggcctgccccgagacaccgggatttttccgggctgacccgcacagccttgagtggctgaaaatggctgaaatggctgaaatggctgacatccggtggattagctaacccgctgacctcagagattttcacgtgcggggactagccgaggcttggcaatcccatcgtttggcccggggatttttctccgtctcccctggttatcctctttagggccgatccttttcctttgctccgtacggcgtacaccgtcatggcctccccaataatcgttatggaccgttctgactcaatattataatcaataatgccctcgaacacttggcatgcattcctaacgggaaacttccaggctgcagaattcttcgtggcgcagttctcggcctcagccctatactactccgtatgtttctcggcattttaaggctggccgagtttattctggtctggactatttgatgccgatggtcttggtttttcattccccagggaagcgttccacgaccttcgattgaaagattagcctggctatgatcagcataactgttatggtgtgatgactgcatgccgcaccttttactcatcattatctaggcctgagacatccctgtccctgtccatgtgcatgcataatcacaattctgacttgacttgtcaacaaaccagaaatcatagctctgccacctggtcgagagcctcgcagctacaggcgatcgccaagcaaatccttgccaattttgcaatatgacacgacgcacggcgttaacgataagaaatcctttaataataattggagagaacaaaatcgacagtttgaatttctttgatatctgaaccctaatctttctttctttttcatgtcctcgggccccttgtgtgttggccttctttcaaactgccaaggtgagatgattttctctcatccacatcatttgcagtccctcgggccttttcgggtttcatgttccgtacccgggccaagcttactcggggctcatcaagttgagtacacaacataggtagtctaaagagggtttctaaaccaggacactggggaaataagggatacttagccagaataactgcaacatactacatacgtactcaataaaacaacggtctttacttgctcagtattacttccacggccaaccctaaataatgtacggacttgagataatgtgctgcaaataggtgctgtgatgagcacatatagtagaacattatgcgtccgttgtacccgatgtcaacgagatgacgtgaggaatgactcgactaaaagacaggagtcgtggatcttgctattaatttcaacacacgtcgagtacctccactcccgggatcaaggcttggatatatttacgttatgtacaatatgcctacatagcggtcgcccacgatataaaccaaggactaagacaagctctaagacataggaatactaagtcgtgtgagccccaattccactactccgtaccccgtatgtactcccatcttacccctttccttccaaaggcttacctccttccctctaagcggcatttctccacccaggcccaactcgtccacgccaacccaccacctccacaccagtggcgccaccaatccattctggcagctcgttgaggtcatcgacgttgtgggctatgcgtcaactggagcggaaaatcggcctagcaccaccgcaccgcaccgttacgtattacggaaaacgcgtcgagctggcccatcacggcgtccacgcgctgtacaacaaccccgacatgcatacatgatacgatgtggatgtctagcaagatgaatggatatgaggactacgccggcgtaaagcatgttcggaacctgttggttggcatgtctcagttaagtgtcactcctgtctgcgatcatgcgatggatccctgcatccacatgtcgacagccagggacgctgcggcgccaaaagtaccctgtctgcattcagggcttgggtgatcccccggctttgatgccgctcatcggcggcgaagagctaaatataatcagtcgcgacgtcctgctgtctggacttggcgtctgcccccgagtaccttgataaagggatgcgctggctttatacgtcttggcgatatatagtgtacatcgagggacccggacccaagagttttcggtttttctcagtcttcccttcactccacaatctctcccccctattaacgactaagcagagagagagagagagagagagagagagagagagagagagtcacctctcgggtttgatcctcctgtcatgactcgatgttggtcctcgaaaattattcagatgtggaagacatggttgtctaggacgagaagcattctttatgttgtgcctgcggctgggggattcatggggcgaagatcattgcccttgttgtagaatactgatgggacagtgttctaaggccttgtttgtcattattagttatacagcccgagatagttttgtttggatagaactaaactactatcgctccgactgtcagctggatatcgccggatatttacataagaataatcaactcggtatctttgactcggctcaaccggcatgacaaactgcaagtgttgaatgatcgtaataggaccactcggattttgccgataaatagctcaagtgtctcgagcaaggaataggcggcctccgttggacttccgcacctgaaatatgcgccaaccgtgtgggacatcgctatcatttgctccttccgttcggattcgtagacaagcttttactaaggtttacgtggatcctcggtgacacgacggctggcgtcggcggccaatgacagagctcgtacgatgacgaagctttcctttccggtgggaaatgggtcgacgttacatcggggcggactgataactcgctgcttactactccgtattggacagactgttgatagtctatcgtagtggttggcacgcaatagcactatctcctgtcgacaatgggattgtctgtcctgtatatgaagatgatattgtccatagagactcccacttttgccctgcatctctatctgggctttgaccaatcatatacgtctgttaatattggccgattactatcatggcaggcaatatcttcggcgccaacgcgggtgctgcaaccgatgctcatctgcacgagaaagaaaaaatggacaccaatgaccctgccgtctcgatttctcgcgagcccgcgtctgaaatttccgatggcaatcgttcgatctacttggattctagcatcaccttcgagaactatgtctactgggctaagcggtcgcgcgagattgaaaagcacatctcgactgacgatgtgggatttgcgcacttgagcaacaagctttttcgtaaaaaaaagtcggacgctctagtgataatgcagggagagattgaggaacaggatgcctccgtcatgaaggagtccagcaaacctaccaacacaatgaacggcgctagcacaagtgacaattggggcatcacggagacagaatgggaacaggcacagcgggccgcgcgaactgcaacatggggttcgatcttctatctcatttccacggacatccttggaccgaccaatgtcccctgggcaatcagtcagatgggcttcggaccgggagctgtactttacactgttttcggcgccatggcttgttattccggcttgcaactgtggaggatcttcatcggtcttgactcgactcgatttccgatgcgcaattatggcgatatggctttccgtatctacggagactgggcgcgcatttttgtgaacgtcctccaaagcttccagttcttcctcaacgtggccctgcttattgtaagcaacggacaagggctggcgcagatggctgtcggtgccaatggcaatggattcctttgtttcatcgctgctgaggtgatcttcatggccatcggctttttgctcgggcagatccgtaccctgcaacgcctttcttacttggccaacattgcggtctggctgaatgtcattgtcatcatcatgaccatggttgtggttcatgagtatcctcctaactactcagcctcgctgactagctatggaacccaaaagggacccgtgcagacaagcgggtactggcctgcgagctcaaccctcaacgacaaagtcaatgctatgatgaatgcggttttcgcgtacggcggcgcaacccttttcaatgagctcatggctgagatgagacggccctacgacttctggaagggctttatcatcgccgagatattcatctacgtttgctaccttgtctcgggtatggttgtgtatagtgcgcagggccaatttacattcaatcctgcataccagggtaagtcgcatagcttccactgtagatcttgagattgctaacaaccacgcaacaggtattccaaactctgcctacaggttccagactttaggcaacgccatctcatttatcaccggcgtcatcgcagcactgctctatggcaacattggtatcaaagtcttctactccgcagttttccgcgacgtcttccgtttcccagaattaaacagccgaactggcaagtgggtgtggattggtctcggtaagctcagatatgcatcccctctatctgtgcacgcattgataatccctctagtgcctgcctactgggctcttgcctgggtggttgccgccgcaatcccgcaaatcaccaatctaacatccttcgtgggagccgcctgcatcttgcagttttcttacacgttcccaccaatgttgctggttgggttcaacgtccagaatgatgcgatactgcctgatgagatcaattcgacaaccggccaggtgcagcgcatagacagcggaatcaagagatggattagaggttacaagaagaagtttgtgtggaacacttttgatgtaatctactcgcttcttgctttgtctgccgctggtctgggaatttgggcttcggtcacttccatgcacaccagtttcgaggagggtaagctgacccatttcacttgtgcgaacccggctggatagatcaggtagaaggcaaggatggaggaacatcaatcctacaagtacggagtagttaatgatagacttcatattaaatcaagacttcatccattcctcactatggaccaaactcgagggattttgttcgagttaccccgagattgtaggaacgatgcgaatactgggtgatactcctaatagtattcttgatccgaaaaattatttagaatcaatatgtccatttacctggaaggtacaggacggcctccatcagtacggtagggggggggggtcgcattggccaaagtggggtcgctggtataatctcatactcctgaatgagagatatggagaaaagttccttacggaattatgaagttgtctcgatgcaatcttggccgagcggtttaaggcgccagacttaagtgaacactaactagtttagtgtgcgttctggtcacgaaagtggcgtgggttcgaaccccacaggttgcatacatttttttatactctcaaatattactatatttggtatatggcgttggtaggggacaggcaactgtactttccactgactataacaaccactaattttagtgagcgttctggtcagaaccaattatgttgtacgagcttatgtacgtcaggactttgtcctggcacacttttaccgcctttttatctgatggagctccaagtcctggtaactaatcttgcaactactataaaacaagtgaacaccaagactaggagtttatcagattgatgttgagtattatgatgacaacgagaaactaacaatacgttgaaagtggactataaaaaaagaaatgcaacctgtgggaatcgaacccacgccactttcgtgactagaatgctcactgaaacagtgaaagatgtaatctcttgagtctagcgccttaaccgctcggccaaagttgcgaaatcgatatttttagaatcgatatagtgttttttgaaccggatatccgtgaatgttcctacaggcaaaaatcgccgcgacaccaacaaacgctccttgacggcggcgcgagtaatacttatctcgccccgtcattaagaagttgaactgtttcataaagccaggttcccgttcttagtcaccgttgccaacgatgaaggtactatgacaggctattcgtactattatacaggaagcctgggaggcagtgccagaaagcaaagcgagggtatgcctcgaagaacgcaagacattattacagacaatggcggggcaccaattggtaggtggtatgaaatgggacatcttgtgtctcacagtatcctgcctaccgaaatctctagcagagtatcaagccaaagtttcatatagatagcgatgcggactatgtactagaagtggtatgctatacgggatttgatagattgcatatatcactataaaacttcgaaatagaacttcgaaaagcagcaaatctatatgctagggatgaaaccaaaaatcaatgcatcgagatgtcatggaagaccaagaccaaaacgctatgctcgtgaatttttcatggcaggtcagcagagtggtatcatgaagacaaagacaaagacatccggagaaatatgatatatagagaaggtattttcaagaaaggaaccctaaaagacaagatcattagttcgtagccgcagcagcctccgtggcttcgccgagagacacgttcattcctgcggcctcggagagattaaccagaccaacgccttccaaaagcacagagccagtctttgagtctgcggcaaagtcatcatcacccaaaccagccgggatagtcccatttccaatgacaacttcctcgccttcagcagcaggaacccagtccggacactcgcggggaccgtccatgcccgcaggaggcaagccccagcgaggcatagggctgcggtaagcccaatcaccatcgcggtcggcatacgcaacagcatgcaagaagatacccagctcatgagggcccgggtccgagtacagctcagtgccacagacttcacagagatttccggacagacgctcgcccttgcgcttttcatagtcctcagctgcggccacctgctcgcggtgcatgatctcgttgacaagcaccgggtcggtgcccggcgggacattcggcgccgcggtcaggtgtgtgcggtacgagaccgtgtcgggaatttccgtcttacccatgagagataaccgcgcgacgatctcttcatcgcgctctgcggtcacctcggctttgccaagctcaggcccgaacacacggcggttggagtagatagggtcgttggtgatcggatggcctaagaactggaggtggacacggatttggtgagtacggcctgtcagcgggaaacagtgcacgatactgtagccctcggactcattggcgaatgccgggactggggtagcgggacgctgctcgtcgctagacgattcggtctcctttgctgcctcgggagggtagtaagccaagcgacggaacttggttgtcgcttctttaccggtggcgcgcacacggttgagacccagcttcgggctcacctgcatgattggctggtcgcagacaaccacgccgtctgggaacttgcccttcacgcgcgcgacatactctttctgcacggaccgggccttgagcgcggtggccattttctcggcgcccttggcatgctttccaatgaacataattccagacgtcaatcggtcaagtcggttgcatggacgaggtaaccattcggagctgcgctcggatcgcaggatttcgatgacagtgttgaagtggtatcgacccgcggcgtgcaccggtacgccagcaggcttatcaatgaccaagaggtcatcatcctcatgaatgattccgacaggaaggctagtaacgggcggttcgtggcggtggagggtgtgtgagatgacctggccgttcttaagtgtcgtttcggggcgggctgtcacaccgttcacctgcacaaggccatcctccagggctttcctctggtaattgtcagtttgcgattcttctacctgaagatccacatctcgacgcattcacgtacatagtattctggcttccggtcgcgaaactcggaagtgaagatctcgaccagctggcgaccccgccatcgctccttgcagttggtattataagtgtaatggtacggtgtgacacgacggaaaccaccgtccaaatagtaaggcgcaggccatggatcgcaaggggtcacgagcacgtcgggagtcttttcaaccggtttggaggggggtacttgatcgaccgtcgtgagggccatggtgggcaacttgagcttgccttgccgtagcaaataggccgtgatacgaggtgagtgagccagatgggcgacagaggtgccagacggagaattgaagagacctggaaagattcgagattccaaaaaaattataagaaaagttaagattcaacaagtcgccccacatgaacaaataatatcacattccacagagcatttattgtctgccccagaaatttaagtatgcgacaaccaatcatatcgatgataaggtggaaaagtaaaaaaagatatgcaacctgtgggaatcgaacccacgccactttcgtgactagaatgctcacttaaatcagtgaaagaggtaagtctcttgagtctagcgccttaaccgctcggccaaagttgcaagattgatatttttagtttgaagatattgctctatgaatagctgagcaaggcaagaaattatcaaacatcgatagttggactatcggatatagcactcataatcgcgccatggacgttcttcgaaaattgttcgaagagtcagttctcatcacagagccacaaatcgtatgttaatcgagacaggccgcttcatctttgccatctctcggctacggcatgagtttagcgatgtttagaaaaccaattaatttcaagaatagataagtctagtcatggtaaatcaacccttgaacgataccatacaaaaggctaccatctatcaggtaaatagttccagacagagccaacgcccaaattgaagagaagataggcagaccgtcactgctaacgctcagatcattgtgtcttcttcgccttcgcctttttctctcttcggcgcttcagggcatccggagtgtattcggtgtcaaggaggtagtcccaccagcggaagctgcttgcgtagttcccaatgaatttctcatggtggaggtcgtgatgatcagcaccagcccagaaaggcaagaaatggtgaagactgtaaggaaagtcatagccactgtgggcatcgatagcctggaacaggcgcaacacaatccagatatacatagtgagaatatgtaggtcaccagtgaaagcacaccagaggatcgggcagctgacagtcccgaagccgagaatcatcacttcaataggagaagcatattcggcagccaaaccaaatggtgcggaatactgatggtgaactttgtgaatcgccttgtagagtggaccccaatgaagagctcggtgcataaaatagtgccaagtgtcctccatgacgaaaaagattgcaatctgatatgccatagtccagggagacggaaaaggaatcgatgttgatagaccgcagaactgggccattgggtggaaaagcctagaagagccgttagtaatccatcgggcccgagaggcaaacgtccggtagaataccactccgtcgagggcaggaacgtaccagatttgaggaagttcgacggtgaagtggctcagaagcacaaacctggcgcagtcccattgctcgcgtagtgaaggcactttgctctgaagcagaatgttagtttccatggcagctggaatcgggttgatttcggctagtgccatgtgttaggcttgccacttacactttgaatcttgtatctcttgaagaaacccaagctatcgatgaagacccacggaagagagcggccgaagtagaccaactcgtggatgaggaaggacatgatgccagtggccaggacatcattctgcatccacgcataccatgcgacccacaatctctctgccacgctcagatgggtattgaatttggtgatatcctgatactggccccaataggtgccggggggcagcacggtagaattcctagggaaaaaaagggtcaatatgcgacaaattccacaaaagagtataattcaaccacccagggggggaaggagacatacattgtggttcctagcaggtcttgaataagagagaagaagcagaggctgagagaaggagaagactatttcgtgaagaggggagtgaaaaaagaaaggatctgggaagagcactatgtgctatatagtgtacagtactccgtatattccctactattaaatcccaatcctgttaaattggtataccacatacaggaaggttccaggcagccaaacagaggcgggcaaatgcgtattatccagtttggtggggctcggatggctatcggcccgtctgtggcctgacctttgcggcgatgacttttatattccggcctggtctcacctcctggtctcaccacttcgggaatggcctgctccgagtcatcgaaagcagcacttaatgggctaatttaagtatccaatcaaatttcttcttttgccgatatcttatccgggagagatagctgattaaaactactgtacacagactagcccagcaagccctaagaacctatacagcacaccatccacttcccaataaacaaccagttcatgtataattctttaccagtttcgcttcccagccaacgctacgaatattgctatttttcaaccttgatgcaaaacccaaccagcccaaaacataactacgctaaacgcctgataatgtatcccaacaatagacagacgcaacaacccaaaatcccaaactctagctggtcacccacgccacattctcacactgctccatccgctccaacgcagcatcaacccgccatagcatcgtccctgactgcgtgcctggctggggcttcccacgcagcaccgcattggacgttgtgcagcgcgagtcagctgtcaggcggtactggatgcattctggatctgcagcgcagtagtccgcacaggaagcgaaagaagtcggcgtcttgggtcccttgtaatcttctttgtcgtcgcctttgctcgcaaagttatcccagttgtctaggtggtctgcgagggttgggcggatgaggttgcggaagatgtcgctgtatgtaagaacgcttgagtttgactgggctttttgtcagtaacatattccagggagatggatataccgccaaaaatgggaaaagaaagcaactcacagtcgcaaaccactgctgctcgaattcccaaaaccgatccacatccgccggcgtcatatggtggaaagtaaaaggcgcaaaacaccaaggtatcttcgcataagcctcatgcaacatatcctgctcccaaaccgactgagtagtcacatgcggccaagaccaagtaagcctaatacccgcagcagcaagcgccctcccaagcacacaatcgcccgcccattcctggttcgtgatcgcatcccacgcatcaacactcattttatggaaatccgccacggtatgaatagccgcatgagacagcacaaaccccgacccaccatgcgcaaacaaagtcgacccaatctgcatctgattccccagatacagcttgtcttcggggttgaaatgcgccagccacgcgagcaggttcggccagatcgggtacgtgtctgcttcgaggaagacgaaccacttggcgtctggcttcgcgcgcagcgcggtgtggatcatcgggaggaatttccacttatccagcttccagcctgggttgtccatcatcccagctgggccgttggcgactttcgtatggtcttgggaggttagggctgtgtgtccgcctgtgcgggcgcggttgtatatagcgaagtcttggttgctttgtttgagggtgtcggagacgttgaggaagacgtcgtgggtgcgtgtaccggctatgtcttcttcgaagtctgagacgattatcttgtgcggcacgcagcggagagtcgttcttaagtgtacagggactttgttttgcgcttccgtgatgcccgtttttaccactaccagcactgagtccattcccgtgtctgtcgggcaggatgatggtacatggtgggtttcagtttttgagtcggtctcgttgtatgtatcaatcgttagcccggagacggatccgaccacgtcctgcgtggtctttgagccgaaatcggcgtggataaattggagtatcaagaggatgagaaccaccgggcccaggataagtacccagcgaccatatcggggcgggagagaaggcatgttcagagattgaaaactctagaggtggggaggaagagaatcggagaaagcggcttcagtgaatatggaaagatctattggtctccatatccagatgaagaccgaaatataaaatataaaagtcgatgggatcttcaggaggggccttgagttcttaagtgatgggcgcgtggggctgattcaagttcaaggtctatgtacatcagtgacatccaaaccagggctattatggcaccattattcatgagggttagttaattagtgtgagaccttgacccggataaaggatgtcaggtatgctgatcctgtcctgtcctggctctatcctcctgggttatgtcgtgcttcaatgtcctctcggatatctagggcttctttgtccgtgttacgtacgtcaccacatggggtgggtccgatgatctgaaacgtgaggtgttgatgtgatattgatcgataatagggaatggagtttcacattatgttaatatgttagagagggtgggagtaaaggtcaagggaagtttaagaccacttgttgcagggttacgatttgcctggtacacccatgcactatactggtacactagagtatgtacaactacatgtacaaggccagattagaatctgagacacctttaaatatcttggaaccaaaaaggatttttgcaatttttgttgtcatttcagagaacaattctctcgcttcacagcgcccggcactatgacaaggcccgagccggacatgccatgcacaatccttaaatttcgttatcgccagagaagtagtatcgccatacaaaaaccccgacctcgtgcaccaatcccaatgaaaaggaaacaaactgggtttattccatttatgcctcggtggtgacacggcccttggggttagtgaccttaacaccgagagccttggccttctcaataatctcgacacgcttgcgggaagaaacggcgtggccgatcctgtagaaattgttagcgtatgactcatataacacgacttagtcgctccaacaggcgcaggacgtactcagcagcgaaggtgcggttgtgcatgaggaggagctcaacgtccttggtgttgtggacgaggaaagccttgtggccggagggcatcatgtggcgggtcttcttgttggaaccgaaaccgatggagggcatggccatctggcccttgaaacggcgacggacgcagttatcaatacccttgggcttgcgccacgaggcgccaacgcgcatgaaccggtcagactggtgacggttgaagcggttcgtgcctaattgcggtcgatgtcagtcctccgattgtgaatgtgagaaatccgtgctcttttcagcctccacgactctgcggataatgtcgcccttcgatccaagacaaatgttgattttttcccagtgatcctccaatgctcttcgtttggtgcatcttgctgagcttgcttgtttcattttgttgacgatcgaagggcgatggtatccagggcatgggtacgaaaaggaatggaacaggtgatcgggaacatacgcttcttcacgatagggatgtgctgcttagcggcgaccatctggaatcaaaattagtgactgaatcgaatatcatgcgcatttggtgactgaccttgtcggtattgttgggtctcgccgggcgttcgagagttgtcgggttcggagttcaatctcgaaaacttctctctcaggttctcccgcagcagagtgggagacccacactagtgcgctttgggcgaactaagcgaaagcagaccacttatgtcagcctagggctggtccagccctagccctactattcctctttgggcgatatctggggatgttctaggtatacatgggtctctcattatgctgcacgttcatcttggggattctatattgttcatttatatgtcatattctggactgatttctccagtatgtaactatcactgcaaatgcaactgaaccttctcgccatctttctcgccactccgcaacatctgctccaagatctcaagatccgccaatgcttcctcgggagactgtctgctgtcgggttttccattcacaattgagtctgcaaacgcagcaacctctggcaaaacacccctgccatcaaactccacatggtgcttctcgccattaactgtcacatcatcgaagttcaaggtgacgacacctttctcgcaagcaaactcgaaaatctgatcattaaatgacgatccccacgacaaagagataacacccgtagcaccagatttagtcttcgcgacggcatccactgtatcaacgggtggcaggaatggtttttgcagctgcgactgcgccgacagaatgctaagacgctccgtggggcctagaatcaggcgcagcgcagcagtcatgtgcacaccaccgtccaaaaggaatccaccctggtattcaggggtcttgcgccaggcggtgtctagttcaatatagtcagtcgctataagaccattcatgtagttcactgggactggacgtacggaagtacttgttctctttgtccatcaggctgtgaacgttgacgcggaaattctggattttgcccagtttttgaacttgctctgctgcgaagaggaactttgtgatataacggaagttctcagcgacggcccagaagaccttactggtgtcgatattactcttgtaccagttcaaaagttcttgggcagtggcgacatccttagcgataggcttctcggacaagacatgcttaccggcgagcagtgctttccgaataaactccggctgaaccaggatgggaagcctgtcggaattgagagttagtgttttactctgtttgagttgaatctagagaaatcggggtgatcccgtacgcaataatcacagcgccgatatctgaacgagccagtagatcggtgtaggacttgccggagcctgagtcttcggagtagagatcgacttcagacgtgccgctagcgaggtcctgggctgacttcaaggttcgagaatagatagccttgagttggaaatttgagacagcttggacggcgggctgtttattagttagttcagtatattacatagaatatgggatcattggagagtttgtcatactagatgctgctctttcgcaaagagacctgctgaatgttagccaatacaaacaacgtagagtatacaaaaatatgtaccactgccaatgattgccacgccgatagacatgattaatagtaataagtgtgatagaatcgagaagaaagatgtttcgttgcagtacttcggtgctattaaaggaagtccaacagtggggaacaacactttaaactgcgggaaggtccaaccttgacgcacgtcatttggtcggctgcattacctatttaagtagtacatcataggtgacatgcatgtataccgtctgatatatcaagttacaattcaagtcaaattaaaaaaaacacattcataaccagacaaaaagtcaatatgaactgtacactccataaccccggttgcgcccaatatcaaaggggaatccaaatccccaaatgcgaccaaatagacgccaaatcatgtccatcgtcgaataatccaatcgtaccggtcataagaagacaaaaaatccaacacatcaactcaaaaccttccaacgttccaatgttccaatgttgaaacccgtcattgattaaccaatgccctcaatcgctccacgcgcgccacagcattctccaacctctccaaccgaccgcgcttctccacatccctcttttccagcacagcaaccctctcctcaagcttcgcgcgagccttgcgctcctctgcgaccatctcatttgcctgactgaaaagctgcaccgtcaactcctctagctcggtactcgccagcgagagttgcgactcggcagcctcgcgcagtttctgctcgcgcgcaagcgcatcctgcagctcggaggtgtgctcgctgttcgcgggggacatgtgtaggagtggtgttcccagcgcggtcggggtacttgggagggggccgctggatgctgctggtgcgggggttgcgctgccacgtcggtaggggaggaaggaggctaggtttgtgaggcggctgtggtatgtttgtcgttgggattgagattctgaggatgttgggcgctgtggtgatgaatggtcggctcgggaggggggtcttcccagtgaagagctgctgcgcggggtgtggtaggctccttggggctgggaggcgcggagacggcggagttcgtcttcgtactcgctaagtttggaggctgtttgcgatcgggttagcggggattcttgtttttaagggttggattggaagaaggggaagggggggaaagtattgtcttctctgtagacgcgtgatcgcattcatgctacacttgtgtgtatgtagtctgtagagatccttcacaggcttacctgcagccaaagcgcgcgctgtcaacgtatgcacttgcccctccaactcctggattctatcgtgggcgccagaaccatcttggggaaagccttcaccccaacacatgggacatttattttctgatataacgacacccttcatggccggtatgacaagcgtggtgacggatgttgttgacatggtatgggttttaccccgggattgacagggtttaatgttttgaactaggcgtactagggttgcaacggtgggttgacggggtttaagaagaacccaagtgatagaaagggaaaaggaaaaagaatttaaaaggctgaaaatcatacgaatccctggcccttcgaaggggtttcaattaaatccatgccggccactccatttcttggccaatcgcatctccttggttcctggatgatctcataagatgttagaatgaatgaatttgactggagactcaactatagtccaactatattcaactgtattcacactatttcgaaaacagacacagttcactatatactatagtgacatctcacaccctcggtcgttgtattaatatgccacgttcttcaaactgttcgagactagtggatcctatttatacccttgcgtccaatagtccaagtggaaatctattttccatgctattactgctaaaattagacataagagacatagagtctcagtataagcatcgtggaaaaggtctgttcttctcgaagtatcgtagatatgtatttatagcctaaagaattctacaaaaacaactttcggtgaacatttcattctatgctaagcggaaattcaattcaaaaaggttagtacgcagaaatggagcaaggaccatcgagacaactctgccatgcaaagaccccaaagaattgaattagcagtcacagaaagaaaagcaggaacaggaattgatttcgtcaacgttgtgctcatgagaggggtgctcataatgactattctcgcagagtcgtcttattcacatggccgagaacggagaaagaagaagagtgtcaacactccgacttccccgtaggtcccaatggcagacaggaacgagaaagaaacaggaccacccgtggtcaatcaaacggaagagaggagaaagttgagagaacaagaaaacagggcaaggaaaaaaaaataaaatggaacatgtagtattcgtttcgcatcggctgtaatggtcatgggcagatcactttgagtcacgcatgggaataatagctagatagcgaacaagacataaaatgaaacttttcggattgccagatcatcaaagcgaggactagatgtatatcggaaaatctagcccacgaaaaaggagaagagatcatgaaaccaaagggcaaaagagacgaagtggaaaggagaataaagctcaatcagaaaaagcaatctacgtccggcactgagaaatggcggaagcaggtggtaattatgagtgacaaacctatcccgatgcaccgctcaaggtaactagaccgagcagcgcaccaagaccggaatgaacctcgtccagaattaacccacctggcgttccggtaaatccaaggctcagggcaaatcggtcgttgcttcggggtatcgatacgtttatgcgaatcctcgaccagtctgtccacggcggttgttgcgcttgttaacactgaccgtgctccatccctcgtcgtcaccgccagcagcaggagcagcaccagcctcaggggccggggctctccagccgttagcagacgccttcttggcttcgacaggagcggcaggcgtctcctcggtctccttttcggtggccacctcttcgccatcctcaccggcccgttggaggatctcaaagttgccacctcccttgggggtctcaatggcatccttgccgttgtgctccacggcaggggctgcctccttagcctgcttttgcttctcagcaaacttttcggccttctcagccttagccttatcggcagcttcctgcttttggcggagggcaagctggcgtctctcctccacctggcgctcacgggtagcggtgtcaatggggcgagcggcaccgaaggggctagccttagagtcgctgctggctgaggtaggagtgggggcggggttatctgagatggtgcgcttcgtcaggttcaacttggggcggctagcaggggcagcaggagcggcaggcgtagcagagggggaggcgggggtgataggctctttgggggtttcgtcggggcgcattctggcgcgccactggttgtccatatcggcagcagtaggtgtgggctcggggcgaacgtgctcggggcggggagggcgcgagccctcgtcctgggaacgtccctcaccccatgcggcctcggttctccggaagctggaaccaggtccgtcgttgctgtgctctcggccaccctcgcggggcgggccaccggcagagggcgaaaggggtcccttgcgctcccagttgttgaagtcacggggctttccgtcggactcaaagttgctgcggcggccaccgcggtcgctacccgcatcggagccggcatccataccacgtccgaagctggagcgctcaggcgcacgtcgctggggaaggtcggggaggggaccacgtcgggaccagtcaagatccttgccctccaggcgagattccttggctagataatctgtcagtcgaaatcattacaaaacaccaaccttcggtacttacgaggctccgcaacactggtacggatggaacgtccctggaaagacgagccagagagatccagagccttctgcagaccctcgacggtctcgaactcgacatatccgaaacccttaggggcctttgtcaacttgtcttccacgagacgaacgttcgtcacgccacatgcagagaaaaactcggagatatcggcgtcagttgaatcgaaggaaaggttgccaacgtggcaagtgtaggggggctgtgtggggagatcaagaggctcccggacggcatatcctccacgctcgcgctctaatcattcaatctgtcagaacatggtctgtgtgtctggcgcggggaatcataccaaagccgccagagccggaggcggagccgtatcccaaatcacccgcggggcgacggttgaaggtggaagtcaatggctgggctgtccatagtgtaagcaagggtttcgatcaacgataagcatgttaggtgcacactacatactggctataaattttgttagtacaatttcgccgtttccatagtggggaaatctggaacttacaaggaaggggcatatcctccatctcatcagcccaagagccaaggcctattagccgtcagtaatcacctcaatcatccaaattttccagcatacgcactttcatcggccaagaaggtgctcatagacatcttctgggctttatttttgggagctagtaattcatcatgttagcaatcgcccatgaatattttcgggggacggatgtcctggaggacatggaaggtctggaacgaacccatgattgcggttttaagttgagggaaacgcgccgggatttgtgcgcgcttctcggagagtagggtgagaaagaagaaaaggtcaaacgatcagagatacctggtgaaaagaccaagaatcaaattttgagtgaagtagttgagtgaggttcaatatctgcaaacccacagtggaaaagttggtagaggggaagtcggctgcggcatggaagtggacgggttactaaaattttagtggtgacgctagcccaatcagaggcgagatcggtctataccagaactgcgaccatcgtcgaaatcgtttgtattttccctggaattgacgaatattgtgagggtaataggctatttgtgcctttgttcgcttgaaataaggcgggaagcgagaaaatgcgagttcttaccttgtctgtatacgatggtgcatttcttatactcggctaaaaatatatcatagaatatactgccaaaaaaaaaaagaatacgaggacaatttcattccggttgtaactttattggctataattttgtcattccaagaggagtcggctgcagtagcctccgttacttgtatgaatcgacagtatgacaagtccgatttatagatcgttccgcattagcgcttgatactatttcatatacttcgcctgagcctctggcatggaactattatatatatagtattgctgtaggccttttgggtagggctcaggtataacgaattttagtggcgtacctacatgtatgtacaacatatattttgagtactggaggctctgatcaggcgctgatcaacgaatatgtgccctcctcaggctgctagcaagatgcccagagatattgtattcccgaagaatatgcaactagcagtggacgtcattcctataccgcatcagcctgatttctaaatatttgtataacaagatgcaataacatcgcaaagctagcttgaatggatattcgagctttatttcaagccttttgacattgtgatagacagttcttggagattgcgtctcgtaccaaagtggaggtttggcttgtgagccagtaggaatcaatcgcaaccatatgaggggaaataaagatcgcggggctggcggtcttgcaggcgatcatctactgggcatgtgcaatgcggggatactatatctgggcctcgttcaccatttatctccaacatgattaaacaaagccagtcgccatagcatgaatataaaatatagaccaaaatctttcgaatattattgtaccaattctgcttatgccctaattcgtccatccaaggccgtatgataacattacataatcaggtacatcaaccgggcacgtgaccatattccttctgacttggattactgcttcgatgagagcttcgatgattgttacttaccattccacgagctttgaactcatgcatctctcgggttaaaaaataatgggtgaccaaatcaaagatatgcaggattttcagtccaacgctctcatgtctgcagccaaggtcggagccctcagcggttagtatctgcccttcgtaagattgtttggatacagacacaacggggttttcaaagatgaagtgctgattttccaaccaggaaccgctggcctgatctatggagcagccgctggagttgtcagatcccctaatcccatgattcattcattgtcatgtggcatccactggtttgcgtgcggctcagccttttggtgtatgtggggacactctatgtttatatcgctgatgtctaaccttaatcttgggacagggctacggagcaacatcattaaacatcactaccaagataaagcgtcgcttcaggagcgcacgtacacgagtgctttatgcggtggcattgccggcggaagtgtaacgaagttgatgggtaccgtatcccgcaccaaaagcacatattctggcatcacgtctaactaaatcatacaggaggccggctggttccgggggctatcattttctcattactcgggtactgcggccagagcgtcttcaaccgagtagacgcgtggcaaatggaaaatgcacacaagacatcgaaacctttgatgcagcgaatggcggaatctaaatggattccactccgcacactctctgaccaagaatacagggggatgttgagggaaaagctccttagcgtcgaggctgagattgctcttcttgacgataaaatccaggaactggagcagtctcgaccggtctctgctccaagccccaagcaaccctgaaaatagggccatgtgaaaataaggcaaatgcgaattgttgtacaatacaaggggagagagagacaaagaagaggacagagtcgagcataatgaatatagagcgggcctggagtccccgagggctgataaaaggatctcccctgaattcttgggtcgcgtgtcgatcaatctgaacaaacaactatataggaacattgtaggagtctatcggaatataaaatgcttgatagtatatagtctatgaaaagaaataacaacagagccattaatgtaaaaaagaagccaagttatgagatatgacagagataacttagcgtaccgctctttttggccagttcctccgatctgtccggtagcccactctcattctcccttaccctttagtttccccccggcatgattcgcctacactcattttattcgaatcagcctgcagtgctcatcctactgagactttgatgggcaaggtcgctgctgttctggagtctggagtcactgattccaaccagacagacagtacggagtagaaattcgggggacctaacaacagtgccattgaactccgacataacttcaatgtgcgagtcgacactgcctgtctgagatcagcccgctgctgatcgcaaaccgcgatgaccctctttaacccgacctcgattctcgtgggattcctcctcctttacctctcgtcctttttcatcttcgctatcgtccggatcgcgacgggaatctctatccaacggatcggctacttttcgctgcgccgaattgcatacaccccgaaggaaggaatacacattgaaatccgtggcctcggattgttgttacacccgccgtcatttgcccagccaacatggatcagcattcggttgacagaactgaaggtgaccgtggactcgacgactctgggccagggaaaacgcgacgcaccgcgtcaaccatccgaagaccacgccgcccccgaacctggcggcagaagcaaaacatggaggacgttaacacgaatcaaggaacgtgtcaagcggctacaccggcagatccattggttggccctcgtggacctgactgctatcgacacaaccgtccactttgtcaacgctggccaaatccaggtgggatcgctttctctttcagtcgacacgcggaggaagatggtggaacggggcaagctatttcgtcgcaagaaggatatgtcgcaagaccaacgcccagccgagtggattatgaatgccaaaaatgttttactcaatgtcgacggccgggagccaaccgagatattggataatgttggtgtgaatctccatggacttcttcacaaggatttggacggactgagagacgcctcggtggcccttaaaattgggcgtttgcatattccatatgacgatctccgcacgctattgcagcgcatcaaaccggtcaagaaatctgcacaggggtcaaatacggagaccgatgacgagatatcatttgccgatttcgtggacgaactcgacaagcctggaagcagagacaatgccattatacagacagtggcggactcaaaggggtttgcaagctcattacttcgtggtgtacaggagatacagattgctttgagcttcttccgtgtctcaaagggtatccaggctctgtctgcaggacaaacccccgtatatctgaatgtggtatcgcatgagcttggaattgatcttcatcggatggaccaaagaagcccagagcatcgcatgtatttccagcggaatgatgttgcccatcaggctcttcttgctgctatctctctttccgtcagcttaggcgacgaatcgggcgagaccgataacattctatacatccccatggctacgacaaccatcaaaaccacactgccttcgaagacggtgagcaccttcgatgatgggaatgctgaagagcgaaacacaaatgtcctgttcgcaaatttggtcgtgacatcaccctcggttgatctccaaccgcaacatgtttcgaggctgcttaaactagcacaaaatcgagcttcttctcctcgggcgaagaagcgagataatcatcgattgatttctcgactactcccgaaggcaagcatcaatatttctgttcacgaacctgtggtccggtttgttctccccatcgagaaagagtctggtactcccgatgattacaacctccttatttcctcgatctcctctatttcactcgatatcgagtcctctcattcatctgaaggcggtgcccactattccctatcgtcaatttaccgggtcgcctcccacaaattctattaccagactccagcaggcaacaaacacaatttgctcacaaacgagaatctggagctgaaggcccatttgaacgccactccagaggtctgtgtaatcgcctcaggaagtcttaacgagtgttcagtccacatgattgatggggatgtaaaccgtggaatccgcgaagtcttgcagcaattcatcacccagatgcaatcacagaagcgggtaccaataccgacaaatgaaaaaaaggcaagcgtgttgagacgagtgccaccatggctactccaatttcagttcgaagccacagggtccagtgtggaagtcgctggtgtggacagcaccgtttctgatatatctcgtggtgtatctctgcaactacaatcgtggacagcggaatacaaagctcaaaaaacggagacaaatgtcggaagcattgctaggcgacgcactccgagccattccaccattggcgatgaatcgccctttcgatttcccccaacctcgcctcctaaggctactcacacacaacgcggcgcttcagatggccggcgactggctttccacgcgcgtggtttcgatggctttgtcattgaatcagaggattatctggaacccgagccattcttctctttgcctcgattcgagattgcgctgagcacccactgtgatcgcctcggaccgctcctgcatgtcacatccgtgttcaagggcatataccttcaatactcactgtaccggttctactgcctcggcgttgccgtttccgtgatccaagacgtgctcacacccttaccgccaaagcactcagaggctgccgaaaacaaacccagggcgcctgcgagtgtctcgctaccgccgcctccggcatacaaatggtctccaaaaaaggagcttgtcacatacgacatgaaggcaacagttgtgcagctcaaggcaaacctgccaaacgatcctcaaataatgattcagatctacggacttgccggtgcttctcaacgtctttctactccttatgttaaagccaaccttgtccgcttccatgcagaggcacctaagctcaagggtgtttgggcaagaatcggaagtatgaacaacgtcaggctggatttccgaaagatgaagatgaaacatggcaacactttggtggaagaaaaatctatcgacatatggacagacttcatccgaattggtgtacctcatcatatggtgatgcaccgcatttttgataaccttatcaacacttccaaggctttgaaacagctgcatcatcgcttcaagaatggttgcagagatttcggctccttgagagaaccagaaggcccgaagaaggtgcctaggatatctattcgcagcaaagcgttgctcttcgagttggaggacgatggctttgagtggaaactgggctgcatctatcgagttggcctggttgaacagattcagcggctggcccgggaagacgccttccagttgaaatctcacaaagtcatggaatctgaccagcggcgtgcctcatctcggtcacgagccaagtcgagccatcggacaatgcgcagcgagcgaactagcctagatacaaggcgaagcaggagtgccgatgaacgcccgagatctagcgcccaagaacgcgggagaggtcggaaataccgctatgataccgaaggcgccacctgtctctcatcggagcaaaagatctctgtgcattctgcctggggccgacttcaacagtacaatgctcaagtctggaaagagaagatcgatgcagctctcatgttccagggcacttctatcaaacaagtccgaaatctcttctctggtgcagatgaacctcctccggatgtgaaagagaccgaaaccattcttgccattccgaacagaccgggtctgatgtcggctctgatcagtgatgttcaccttgttattgacaagccttcattcgctatcgatgagttccccagttacttgaaccgaatcggaaaggggatgcctatgtctatgaaatacggcctgctcatcccaatgagctttaacctggaaatgggtgaagcacgcgtcaacttgcgagattatcccctagatctattgcacatcccagccctgcgcccagggcagtccccaagacttcccagctggtctttgcggacgaactttgtcattgcagaagaatggcgtgaccatgaatccgcaagacaggttgaagtggaactcgttcctgcatctgaagggttcgacggatccccccgcgatgcgttcaagattcaggtgtggcgttctgttacaccagtcaagacctattcggaccctgtcatcgagataaacacaagtttgccgactagcatttcatggggtgtctcctatcagcctgttattcaagatatgatgaagatcattgagggtttcacgaaacctgaaattgatccctcggagcgggtgggcttctgggacaagatccgactcagctttcactcccggatcaaggttctctggagggaagatggcgatgtacatctgcgacttaagggctctcgtgatccgtatgtggtgaccggctttggaagcggcttcgtcatgtgctggcgtagagatgtccaattggatgtgcacaccagtgacaatcccatggaattcatgactgtcacgagcggcgaatatgtgctcgctattcccgactacagtgccgaagcacgttgggcaaacgaagctaccacagaggaggtggataacagttctgcatccagcgagcagaagaatgctgcccaattcaaaaaggttattatgaagctctctggcgatgtcaagtgggcagcaggtctcgtcttcgagcgggatagtgagaatgatgaaaggtccttctccttcaaaccacattatgaggtcattcttaagaaccccagattcgtcaaaccatccgagcagatcaattacgatgcctatcgtggcttccggagtgaccatattcacctttctgtctcgattattgcaccgcagaatagagactgggctgtcgacaatgtgcaaccgtcttcaagctacaacacaatccatctctcaccgcgattcttcacccacttcttcaattggtggtctcttttctcgggcgtgatgtcgcttcctgttcgccaaggatcgctctggccaggagtcacaaagaccgccaagaagttcaatcgtcatttggcgactgtcaaatacaagattcttcttgcaccccttttcgtggcccatatgtacaagcacaaggatcgcgaagattatgaagagagagctgttgtggccacgggcttgaaagttcgccttgattgcttgaaacttgatatccatcaacgtcgcgagcaaatcaaaacacaagccgggggccgttcaaaacagaccaggacaaccgcgatgcgtattaatcaagcccaaattgatatgcaatctgcagacttccgcgccgtgtccgccagcatcgaaggcacaacaccggaagacgttgagcgcaacaaagacgatatcctctcttccttccaacagcctgttccatcagttgacttgtctcgtttcacaatccctgatcacaatttggactgggtcgacatggatgatttcgtggagccggactggatccttccacaggagtcgaacccccgtacccagatcttacctttggccttcaccccgcgattcacctacttccgcaacacggatcactgcgacatcggacccgacgaaacgggctacagtccatttggggacgaaccgacccacgagtgtgtcatgtctgaaaccaacgatcctcgccgtgttcagattgagttggtcaaagaccgccttgcaacagtcgaggcacagattcgcaattatgaaagcacaattggggaaatcgaaatcaagcttatgaaagaagtagacaataatacagaactgaaagccgagcatgagttattccttcgccagtctgagtctctagcgagacgacgcaagttcttgaccacaactctcaatcgtcttgagagacatatcacacgcgacgagcggactccatatggcgacacacttggcaaaaacgttgcacccagcactgcttctttccgaacaggacgaacaggtacaaccgatggccgttcttcagccttggatggaatttactcgtcggccaacgatgagttctccagcgatttcgacaatcgtttcatgatccacaacatgcagctcaaatggaacaactcgctccgcaacatcgtattgcggtatagtcaccaagtgagccagcggcgtggatttgtctactacatgtctcgccgcgctgtcaaatttatccttgatatcgtggaagaacaggacaagagcgatcgcaagcagcctaaaatgtccaagacacaaacccgaagttcgagcgtcgatgaggatgaggaggaggttggagatcgcattgaacagttgctgaatgatgctaagcgctacgtgaatgtcgaagagaacgatccaccagactcgaacaaccaatcaactccgaacaccccatcctctgccaattcggacagttcgagtgagaatatcgtgccggaattcactccccagaacacttatcacttgcgtctcattgcacctcaaatacagcttcttagtgaaaagaaccagaagtcggtcttgcttgttgccgctaaaggcatggaactcaaggtcgtgtcaatcatggacaaagggcgtgtttcggatgatgtcagcggcttgatacaacgccgtttctccctcgaaatggacggtgcccagtttttcgttgcaacacagaagaaattgatgacaaacttgcaattctatgctggcaataagtacgggaatgcgcctggatcagcgtggccaccgtggttgactttggaagccatgtttgatttcgagttgaatccatttggattctctcgtattgtgcaaaagacttctgccaccctgcgttacgacaagttcaacaatcttcgcctcaagtataacgaagaggtgaacaagaatcaggaaggacctcaacctgacgaccaagaagaccgcatagactcgattagtgtggacttccctcatttccgcgcgatttgtgattctgcagagtactattccatgtacattattgtcctggacctcatgctctacagcgaaccactcgaaaaggtccgaaatgagcgcctagagaggatcatgctcacttccgacttcagtgaccttagtggcgccccggaaatggtgttcaagcttcaagcacgcattcgccagttggaagaaatcaaagagtactttcagatcaacgctaagttccttgacaaacagggctgggaggatcggctggccctcgaacgcgacttgtctctatgcgaggatgaacttttcttcatgatgaaggcaatcacaacttcccaacggcgaatggaaccgagttcgtccagggacgccggtgtccatggcttactgcgttggagcatatcggcgagcgaggtcgtgtggcacctgatgaaggaggcttctgagcccttgattgagttccaattgcgcaatgcttcatatgagcgaaccgacaatactgatggctcgaaccataacctggtatccatcgaacgactagtcgggttgaacttacttccagacgctatctaccctcaaatcatcgcgccttacctcgacggcggacgcaccctcgatgacttcatgttgcgcatcaaatggcacatgctggaggccgttgccggtatccctgtgcttgacaactttgaagtttcattgttcccgctgaagattcagctcgaacgcgagctgggccagaaagtcttcgaatacgtcttccccaacgtgggttctagcgcctttgaggctggtggtttctcgcctttcatgatcaagaacatgaagccacttgaagcttcagatggggaagacgatgacgaaggccccaacggcgaaggccccaacggcgcaccactgacacgctcaacgagtatcgatggtgatagctcgtctatggacagtctcgccatctctaagggaccgggctccatcgaactgcgcctccagccgacactgtcacttttagatgagaccaagccgccgcgtcatcgctcaggccatctgaagggtctgatgatgacacctatccaccaagatagtaatcgactgggtgtctcggagaccgcgcgcaaaacgggccgtccctctacaactggtggtctccgcaagaagaagtctgctgatagtctgcgcatgttgactaaacatcccaccgaaagatccatgtctagccacagtgctagcgaagacagtcgcaagaagttcggaataggtaaagggaccaacaagggcggcaaatccaaagagcaaaccgatgacctgacccaaatgatctcccgcgcctccaacttcatgactctcgcacatgtgaaggtgaatgacgtagttctttgtctgagctacaagggcagaggcgagcacaatctagaggatctccacgatttcgtcttccgccttccagttctcgagtatagtaacaagacatggtcgaacctggatcttgccttgcgcctcaagaaagacgtgattaaagccctcatctcgcacgcgcccgccattcttggcaacaagttctcccaccaccgaccttcgaagcagcaacagaagcgtttccgtgagcttgcatcctcgtctcaactcctgccagacacattcagcttgatgaaacagaacaatgatcaagcccatagtctggccagctacgactctaatagcgattactcggagtcccgctcgcgcagatccatgcagtcgaatgcctcgccattggctaggacgacctcgttgaattcagatccccacggcacagattattcagatcccaccatccatgactcgcggtccgctagtgatgtggatgtggattctcgctgggaggttcgtgttctttcgtctcaccgtgtcaccgtgaatatccccgaatgctaatacagaatgtttaggcgtcgcgtcgatttgtcaatgcccctccacccgaaaggccgatgacatccggtaacaccgtgactacgatacgatctggcaagaatgatcaggatgataggtatgaatcccacccccgagtccgtttatcgccgtggcgaagaaaccgactgactcgtctagtcacatcaaaacaattcgcaacatcggccggaagctgacattccggaaatgatcgctttgcttcatctactatatcccttcttttctcttttcgttcctatttgacctaatacctctacacccttttaaaatcctgtgatcctttgtacactaccatcgctttattcccaccagacccctcgtgtctcctagataccctctacctgcatcgggccgtacataggtgactgtacataacatatttcctctgccgggtggggctttcctatcttagctgccgccgcttttacgagggctcagatacaccacggggtaaagccgtgaggttctgtgttccctaacgaatgttagggcctgatatatagaaccgctgaaatcaaatagacgttctgtttgtccttacgatcttttggcctgactagttagttatctagttatgtcacgtaatatagcttagttgttaaagttatagactaggtactcggcttaccgagaacggtagtctgtaggtaactttgtgttcaaccgaagacacaatatatagagctgctatcgaatcaaattgtaaggcaaattatagttttattacaataacccagccattgttaccaaggaatacagttgaagtagcgcgttgcataagcttccagtgtactgccatgtatttggtggcaagtgattctgagcgcaccccactcctgaggctccagatattcacaaatatgagacaatatctctggaggcaggttagtgatagacattttgaatgaatagtcacgtgaacggttagggatggggttggaaaggggtttcggctcagaacattggaatcatatgagtttaagtaatcaaaggttagctctaactaaaaaaaaaccttaagagaccctccagggctacaacttcgcttatagtgacgtgagttcaccgtgtttctaatactaaagaaaggagaactgatttctgcgctgatacattactctgtatccaacgtattgtgacggttgccagtctactaaagatcagttgtgtcaagacctcagtactaagaaggctgatgcctgaagtatgacaccctgttatggtgcgtgggtcatgtgtcccacaacctttatattatcctcgcatgctgcttctttggagaagcagctattagttccactatgccactgcgtatattaggtgcgaggtcactgtacaacggcggatcctccagctctaggtgccagccatctggctcttccaccttgatcccctttgactcatacccaggtaagacctttggcgaggtctcaacagttggcaatggccagactgtggcgtcgtttgggtcgactctcatgatcaaggctagcgcgaaccataccctctcactgaggggtgcggttccatggtctagagacctcggggcgtctcacgtatgattacgtatctgctacctccagcaagatcgagaacgaggtttatcgtcatcggccagaatatcaatggcttctatggtaagtactggacgaagataaaacaaaaaacccgccgagtgaaggggtatttaccaatagtgaacatcaccctaataaggagaaagtaggacttacccatcaataattacatgagacaacctcatgctgctaccttcgacgttatagaaaaaatatgatcggaggatatctagcaacggcatctcccgaggccgagagaccctggttgatccttcagcggcaagtggatggagccttgtctcagaatatcgcgcatattttaccacaaaagtgaggagaaggatggcccccatcagctagagaccctgttccgtctcgggtgcaaacagaccctggtcaggaagactcatatggcccccattttcagaaaattggacctggcccctaaaattcaatccaggatgcttgttccaggagagaatagctgggtcaggccgccgatgattgcaagcattgctacccataggcatgtagctagactaactttaaattagatgattataagaaggatcccctctccccgtcgatatttttgaatctcacagcattttccctcagtattctactggaaatactagatgtaattcttcttacacgctcttttacttattcatgtttatcaactgaccgctgtagctggaatcagtaatcgtcaataggaacttctacctcggttgctctttttgacttgctaccaggtattttcatggaatttatactacaaaggcttggaagtatatatgctgagtccacaatatagataatcaagtcgcctctagactctcaaaactacctataaaatccatctacccctccctcgtgcacttcttgtgcttcttgaccaccatggttgaaggtctcacccggtaccagatcacgcccccgagcgacgccattgtcgtccccgacagacaatccatgaacgatctggtcaagctgaatccggaaacaattcttcacgccgagaatggaggctattatctcaagaacatggacgaagaggtcgttgccatcgctggggatgacctatgcacagagttcgacgccgtgtttgccagtattgatgctgatgtcgtcggtgacggctctagatctggggatgagggatctggatctctgggcggggcaaatgttacgaagaggaatgaggatctcgcgttacccgaactgtatgcaaaatttctgcagccacccccgttgcttccactctgccacctgtctgagctactcgtattgccatatatgctcctcaagcagccggaaagtttgtgtctagagtgtagtgttatttaagacaatattagagagcctgtacggaggtctgaaagggtgtggcacgggcagtgaggctggaagaggaacacgagtgagaatatagcatctgccacatctatcaatatcctattattcgctctgcagataattgtcttttgtcttcatagatgaaatgagtattgtttgccaatttcaggtactctgatcaactcatactatcgtattccactatattctttactaatttaatgagtgctataccttgaataggtcaagatatagttaaatttagttcctcttttgattctttcagtaccttcattttaagcttgatactcgtttcctgctgggacaggtggctatgatagcgcttccttgtacatgtacacactagttagtggcttccccttacccatgatatagatagattttgtttagcacctcttcatttatgaatatgtaccaaggctgacgtcgtagggtaatttaatctctgaatatctccactggtcggtaatggctttacagcgggggaaattagttgcccagtctagtctctttcatacactttgtagtgtttatacgacgaagtatgtcttgcgtgaagttaatagtagaggagggtataatgtacgatccctaggactttagtgggaagtctagatgtatataaaataataaacaatatcttagggtcttaattctcccagagaataaacagagggtatctatatacaacatcattagcctgcgcagcaaaacaaaatccaaagaatgtcaagtctataagccctctccccaatgcatttgcatgagcaagcaaaaagaccaaaatgagaaatcttcattggaacaaacaaattcatcagtcatacatattacacggataatttctccgtagatggttcggcattggaagaggagccaagagttgctccatcataagttccatcggtgacgtgagacgcctcattaggggaatttctggaggcatcgttagagacatcatgggctccattggagactccggggacatcatcggatattttctccacgccttcggatggtgccgagggatggtggtgatgattatcacgagtccagggccagacattagcctggacggactcgaagcgggtacgtgcagtgggcgcgctgatatcgtcaacccaacggatgcctccttgtccacggttttcggcccacgcctgcttctcacgacgcaggtcactcttaacccagggaattgtgatcaaggtccacacaatagcccaggcaaacggaagggaccagcccaactttacgtaaggttagtctgattgtaatttgagattaaaagaattccggcttaccgtaaacgcaacgttttcctggacagtgaaaacaatggcggtaatggcggcagcgcagatgatggaccctccactccagaaacagttcatttcaaagagcatacggcgaaaataaggactcgataggtatcgaattcggagcgcatatcgatacatctgtccaccacctccgtcaactgctaccacgtcctcaataagcgcgtacaatgcagttggcataacagagcctttgggcgtggaagaaattcggaatggagccttgaagcccatcatacggaaaatgtcgagggaaaggtagacgatgccgaagtagaacatgacggttggtaggaccatggcgatgaggcgtactgtttaagcagtcagtatgaggcaattgcgtaagatattatgattggttggtctaaccatatggttcttcaggtaccgatccactgtgaacttgttagctcattgttcatgctgcttccatgatatatgctagacttacacgatcaattcgacggccagaatcaaccacacgatggtgaagttgatttggaagaaatccagctaacaagaggtatcagttaatggtccatgatcaatcccaggtcaaaacctacccatgatacgcgggagttcaggggccgggcgcgtgagcttttgcggaataaattatgaaggcggtagaagtattcgaagaccgagactcctccaagcgatgcggtaacgatcgagaagactgcacatcaaaattagcaacctggacgggcgtatttgttccaccgcgcaagacataccgatgttgggcgatagatcggtgaggtaccaaagacaccaatacagaatcaacggctgagccaaggtatcgatcacgaaaatagtccagaagaacgcaatggacttcttccttgtgtgcaacgagtacgggagcggagggggctcggagggtgttgggacggctccttcttccatcggggtggcgatagtggcggattaccgttgttgataggttcggggaaagcgcgataaaggtttgatgaagtattaagggggttattaggacatggtgcgaatgtgatgatgactccgaatgggtttccagagagaaataatccaagaaaatgaagtgaagaagaggcgaatatgtaaattgaacgcccaggaaattttggccggaaacaacggggccaggtacttccgttgccatactatttggctgggaggacaggtacctgacgtaagactccatgatgtcattcaaaacacagccctgatcaaaccacctgctaactatgtgggcatattttatgcatatatcccttggcgaattgattttgcctcttatttgtctggggcttgaggatactaatatcgaatatggcttatccaatagtcctctatggatatagtataaggcaaaccaaaggggaattaggacgacgtcaggtagttatgcaatagacatgaattcataggtatgagtcagcgaagactaaatatgcacaaatcggcagaaaacaaggaatcgagacctaaaaccgacctcgggaggcataacggataccgattccgacatggctgggcccgacctcgggagtttacgttggagcttgttcataactgccccagtcatacggagtactcggtacaaaggagatatctcgtatgttctacagcatactatggggtaaatacggagtagttatacatcattaattgttatacatcaattaatctactctacctataatggacaatgtactccgtaatcagcagagacctgaacattggttgcacgtaggatattcttctgcaatatattttagataagtcaaaggatatcatgaaatctctccaatagcagtgaatttattattgttcatataaaatagaccccggatcattcttgatgccttacaaacaaggcacccacattgagaaagataaggtcatgtgacatgacaatcgcactgcaaaatttggaagctcggcgttcgaatccccccccttcaaaaatttctacccttctttaattttccgacacccatcacctttctagtactgtttttacttccctctttctatccagaaaaaagacatgtagccatgcctggcgtacaacatcttatcgacttcgtgctgaacgaagtcgcgctctgcggtaatcaaggtgtgtatagtctcttcactgggacccacttttcatgcatatggattttcaatgtcaccggaattatgtgaaagcgccctagtatgggatatatgttgaactcctacttcactctcctctcgggactttcgcatgatggatttgagtttgcattcttgtggcgcggacccaatgccgatttacatcctacatctcaagccttgattggcgcttttattcttatatacacttcgatgaatcgaatgctaacagacatcaaggtgcaacattatctgatctactgcaagccattgatgatttccatacacaatctcaggatgtgatggaaaaccagaacattgaccatcgtttcaaagccaaagtctggtcctggctcacgactaacccagaggtgtctattggccagcacaatgaatggaaccatctcaccttaagtgaagccgagaagcttgactcgcgaataagggagaaagatgatgccgatagcaattctttggagcccaaccaaaccgcagagaatccggatttaccaccgcttcgaatctttgtctccgaagagagagcctgggttgccatcactggccatccaccagatgagtccaaggtactgccccttgaatttgccttactgtcggtgattgcttcgcgcaagtcaaagggtattgtgcagccggacctggtgaggctcagtggccaggataaacggtctgttccgaagcgtaccgatgctttgcaaagaaaaggatacatcgacaagcgacctgttcaaacaaaaacggccagaaccagcctctgcacgctgcagcggttctaccgccacactattagcgatcaaacaaagtcagaaccgcaatcggagaacatgattgatttcgacagctttaacaccagcctgttcaacattctccgagagcacccgctgattgcacgcaatgatttgaaacgactcctcggctttgatgaccattggcgttggaaggtcttgtcccgtgccctccgcaagtgggagcggataggcgtggtacagcgtgtgagagccgaatcgcaatacgaaagaatgcatccttgtgtgaagcttttacgggatcccacagggcaagatctggaacttttccatgaattcaatttcgatgtcttgaacaagcatggggtgcgagccaaaggaactaaacctaccccggaccaagaagaccgagaattgcagctggggggccaaaccaaaagatcgcctagtctggaggacagtggggttgatatgatcaaagagcatgttggagatgctgtacgtatcgtaccgtcttggacgccggatcgtaacctcaacaaccaaatctttgacatcgttcaaggaacaggtacaacaggcatcacgaaccaggtaagtaccttactcgcgaaagtgaagatattcttagctgacaaaataatccagaccttaaacttgacttgctttgggtcctttttcaagagacccgctgaaagtatggtgcatcgcttggtcgacctatggcaagtggcccagccacttcatctccgccattacgccattgttcgagatatggcaatgaaaaagaccatcatgttttatgtccactattcgctaaacaacttcgcaaagctagttgaagctggccaggcatcatgggaggccgttgagattccagccaagaaagccaaatcgctaaagatccaggcacctccctttggtgctcttcctcagcttgatgagcatggattcctcaaaaaggaattcccaaagaatatgttgaaggatccaaattcaactctactcgacgggatcacggctgtcaaaccgcccaactatcttctttcttcgagcgatccttttgttgttcaactttcaaacggtcaatatggtacgattgccccttcctctccttggatttcataagagaaattaccgtgaatctaacattaagccgcagtgatccgcacacgaactgataaactcccccctggctccaagcaacagtatgagccccgtttccggcccaagggacgaccgaaaggcagattgaaccgcgcgactgtcgaaaagcgtgccagagaatccaaagccaaagaccccatagccatagagtctggagctggagaacccgacgctagccaatccgaacccagagaatctcaagccgtggaatcccaagttaagccggagccaagccagggttatagctgggaatatgtcgaagaatccccgcgagccaagagagccaagataaagcacgacagccttagagggttatcaaagaaagagaagtttgaagcacttggtatggatgagagttggactgaatacaacgctcttgtcatggaaaagcctgctcctggtgtgtatgtgactccccacggccgaagaagaccagccggcaaggcccgaggtcgcccgagacagagccgaattgcgatcttcaaatcgccacagctagcatcgatgccttggtttgtcaaggacgaagatgattcaagtgaagacgacaaggtaggggatgatgctaccactactcgggcatccgagagccttgcccctgaagctgcacattcagtcatcaactccgaggggcctgcaatgacccccactccgacaacttcaaggcgagccaagagaactctgcccaatgagccagcggcctcaccgacaaaatcctcgagttcccaagccaatgagcagagaaccgggagacctgccaaacgatctcgtcttcgcaaggcccaaaacgaaaacaacgaagaaccttcgaaggacgctaacgagatattgcccgaggttgtagttccagcactccaagagggttcaatcaaagcgagtacaccacgccatcgtgacaagagtgccagcgctcgtatactcgaggacgaacaagctggaactccctcaaagcgacgccgtgtggcatcctccgaccgcgcgactttacaatccccaacacctcgtccatctgatgtcccgacaccacgattgggctcagtggtcccccagaaattcaattttagcgccaatggcaccaaacctaccagaaagccacgtgttcggaacagaactaacatcagaaacatgctaattccagaggaggaagaatcgggatcctctaagcctttgattgggagaggcggatctatcagtgtccttcggagaaagctcatcatggaaattatggaaaaggctgatggtgtatatcctgcgggcactgcaatgtggtatccttttgtcactgcatggatgaagtttcatcccaaggaaaaaccagacatgcgaactatcaatactgcgtgcaagcaactgattgatgccggccagcttcggcagctaactttcagcggccgagacacgagaaaagtgatggtaacaaggacgttgttgttgaagcctgatatctcaccagacgatccgttggtgaaagagatgcagaaaaagattctggctactgatttccacgagtcgcgacccttcttttcggccaatgtcgagctggatccaaatttgacaagaaatagtggtcgaccacacggtgcacctccccgcacgcagagattctcattcccggtagaagaaggaacccatgttcacttacaacaaaagcctatttccattgtgaacttagaggcaagaaggaggagacaggcccagacgaatttcattaaacgtctggaagccaaagccaaagctgccaaggctgccgaagaagcggatgaactgcctgacctgcctggagttcagcgactcatgacactcgcacgccctcctcaattggaccttgattctcatccgcacacatcaattattcgtccatatatccgaacaggtacacgtggtcctggcaagcaccaaaagtctatcatacatcccaagcgggtgatgaaaccaatttccgccatcggagcgtatgccatgttgatgaatccggtgcaacagtttgacccggctagtggaactttctctacggggtcgtgctcggccagacgccgaagaaagccaatggcagcaaaacagccggttttgaacattgagaaatctgtcgacgagttatctagactggcttgcgacgaagcagactcggaaatccctagtgctgtcaaagcgaaaattccactgtcaacattcacccaaaagaccaaaaagatcctcaaatgggagcttcatcatccaaatctctttgaagcgaaccttgaaggccagcagtttatcaaccaaactgttcaagatgctttcaagccagcgccggtcacaggcggtatttgcttcgacatggatatacctcctccaaaacagcttcaagtgcctgaaatacctgaagtgcctcaagtggaaccagatttgccagcacggcgtagcgaggtccgtcgccagcgtcagtctctacctgaacctctgccccagcctcctataaagactactccgataaccgagacacaaaaacggacacccaaaccaagaagaacacgggctcctcgggccccgcgtgctcctgttacagatcgccgtctggccaaacttgatgatactgcaacagccgacaaagaagcacagtcggcgaccaccaaacgcattcgccgacagcgatttgtgcgccctatatccgaggatctcaaacaaaagatagtgattgctcttgtcgtcgttcgtgtgcttgcaggcggagcggaatcaagagtgatcgattggcctcttgtgacaaaagctttcccagatcaagattcgtcttttatcgaagggcgagcgcgtcagatactcaacaagaatcgcttacagattacgaagatgcatcgtgatttccaggagtgcttccttgaggcttatgaaaaggacgaagttccgcccattgactattccgacttggacagctatgactggcctgccctgattgaatgggcaagcactaggctcgatgtttctccgtcggaacgggctccggacctcccagcaacacggcaacaattcgacagtgttttcgaactacgcgaggatgctattacggcaggcgacgaactgtatcaggctgtgcatggtgtcactataaaccacaagcgcaacctaatggcgcgcaatccattcgctgtacccgtggatggtgagacacgcgcccagccggtttcacgaaaagttggtacagcacaacttgaggctgcgaagacatgggttcgtgcaaatatcgtcaccgcagaagagacctaccgacccaatgagtcgagcgatattctgcagcgctttggtgatcgacttgtcaccactgcgacgcaggcactactcaatgaacgtgtcatcagctcaacaacccgtggccgcatcactccgggtcgcaactatgatatctcggaatatttcctgcagacactgagccgcaagcgtgccgtcgaaagcagccagctgcgccgtgccgctcatttcaagtcaaagatgctagatcttcaattccgaactaccggtgcatccgacgtggagtacaccgcagaagatggcgatatcctcgcattgatcaatctctacgcttcgggtgctattcaactacgaccccgcgatgcccctcgcgccaagttcggcctcaccgatggcggctatgaaacgcgccaggtggacaagaaacgattccgtttccctatcgagattactcccaccgcaacataccgctacggcaaccccgtccatggcaaggctgcagccgcgtaccttccacccgcgccttcaccatcaggcccggaaatgccacctaggaaccccctttggtacgacatcaatggagagttcatacatcgtctctgggatctggttattggccctgttctcgggtgcctggtgatgcggcctggcatcaaggctgccaacatttctaacatgatcaagcccaccatgggcgcatgggaaactgtgttgatgctgcaatggctcgaggaagttggcattgtcaagccagatggcgagggagacatggcttgctggagattacaggagtcttggtggatgattctatcttgattgcccatcctcgtgaactacttatcttgaatgtaacattatgtgaacaatgcttgctagccatacttctcaaaaagtcaagaaaaatacaaaagaacaaggatatgggtgcttgatttcaaaaactatctagaggtatattatagatcaactccggtaatgtaatcccaaacgcctaaatagccagcgaaagaaagtaatgctcaacatcaaccccatattcgtttacagatcgtcgacgttcgccactcggcgcaatatcaacaagataagagcaacgatcaccccaatgatagcccggtccagccagatactttcagatggagactccgtcgaagccaattgagacgagcttgtctgtgtatgcatagcagctgcagccggtgcttgtacagcaggcagtggtgcctgtgcctgtacctgtgcctgtgtttgtgccgcgggcaccgatgtagacgcagaaggagccggaacaggttccgcagcccgagtactctctatagcatcatctccccgagcctggtgctcattcccaacagttatagagtccccactcgaagccggagccagagcaccagtatcagcatcagcctcggcctcggcctcgaccgtctcccgttggccctcgacaccagaacacccgtccacagccgcaacctcaccctcaacctcgaccccacgctcccgacaaaccttccataattccctcatagcctctagattctcagccccgcattcacgacaagtccacccaagcgaaagccgcgcatactccctccgcagctcctcactcccctccatgcccccaacctggccctgactctccgaactgaagatctcagagcggatgcccagcaatgcagtgcgcacgccccaagccggctgccatgtctcctcgtggtggccggaaatgctgaggcagatttcgcggttgacttcgaagcggccggagggcgtgaggaagcggaaagaggggggacggagtgggtatgtggctgggaaggtgatacggccgtggtagaggccttgagcgtagggggaaggggaggggggtccggctagggtgaagtgccagtcgtggaggtttgtgtcgtttattggggcggctgtgaagtatggacttgggtttttgtggaggtcgctgctttctttcaggaggcggcgggttgagggggaggacattttggtctttgtgtctttggataggattagatttcgagtcgaggatgttctaaggttgaattggacatgttgggaggaagaaagagcgataagacaaaaagataaagatgacagctgtcccgggtttgcgggggaatgatgctattgggccgtggcaacgttgttacggacgacaatataggattcggaatgattagggcatatcttacagtaataaacattgtacaataggaattaaggtctaatggacatgaaagccttaatatgaggcatccataccaaggctgcgcatacgctttgtagatgccataaacacaacgccttcaacatgctacttaaaaatgctacaaacaatcacttgttcttagtcccaggcccgccattcatcatgatcacggcgtgtgggttgctggcggccagcgcccggatccaataacccatcgtcctccacgtcatccccataatcactatcgccaggccgcggccgcggtgatcgaggtgcaagagtctgcatcgacaccgacgtcggaggtcgatcaggcaggccaccgcggcttgtcacccgctgctgtggaccgcctcccatccaactattactgttgtctagattgcgctggtacaactcacggtagtactgctgctcctcggtggattcctgttctcggcgctgtcgcatgcggtcccgcgcttctaggaatttagcactaggctcccagtgccagccatcgccagtagttgtgcagatgggcacagcccagagcagcggccggtccccgaaaaggtggagcaggttacaccgccagccgtggtcaaacgcgctgggcattttttcgttgtcttcgtcgttttgatactcctcgtaccgcgagtgctcgcgctgccgttccatttcggcgtatgaccgcgtcaacgcttgttgcgctggcgtgaggccgttccctgagccgtctgggggccctgatgggcgcggcacaggagatatgccctcttcgggccgggtgactcccgggattgcattggcgtgggcatcgataatctgatttccatagtcttgcattcggttggataagctttcctcgcccggctcgccccaatagttattgttgggcgccggttcattccgctgtctgtatagcgctttgcgcaaaggcgacacatatcgggtcctttccaaacattcaatggtagtggtaccccgtatagctagactgatatgccaggctgtaaatccacccaaaaccaatccaatgatgccacccaggatagccagcagaactacattgaccggaagaatagtatccatgtactgggtatcgtttaggatctcggtccagacccagacggctgaaatggcaaaaacaacccaacagaatatcgaggtgtagatcaaaaatagcaagaatgccttataattatgcagcccaacacatgttgccagccagggacaatggtggtccatcttgaggacacatcgtctgcatgtcgagcagtggtgcgcgcggtccggcttcggacactggcattttttgcagtatcgtgattcacctgtcgaggtgacggtatacgatgtgaactccgggtcttcggagggagggagggcgctgtactcatgacggtcggtcccgcgactagtagaagtcggtgaccccggatcagtgaaaacagcgacggtatatgagaaattgaggagggcgtagagggaaaatgcgaggatggaactcgggatacctaccgatatgttagtacacccggatacatagccccgttcgagtccgagcgatatcctgcatacctatccagtcactccgtgacggtttgatgccgatgctgacagcgacgtatactgcccatgtggtgaggccgtagacgaaggcgagtggaaagcaggttgctgctgcacagcagtaccgttcgcagcggagagcccaggctcgagggcgtcgtttcggccacgagggcgaggtcgggggtgacgaggccaaggtggccatgactgagatttatgacacaagggaaagaagattatgcattaaggattttgacgggatcggtcccattataggcaaagcattgaagataagacaagtctcaggaaccgtacctacaatacatatgcgatggaaacgaggctatcaggtgagatgtacggtaaggtaaaccgggtacggtaattttgacatgctccgccacggccccagccacaagaagtgcgtacaacatacgtgggggacacgaagtatcgtcataacaatgttctatttacggcgttgaagcatattttcaggaacagggaaggcatagggaatattatcaaataatcataggacactactttatatactcgtatgcatgttggggtaattggtgatatatcaatatttacagtcataattctaatagattcatcacggctctgccttgaaatgcaatgcggattgttctcgaacgtaaaaaaaaaggccgaatcagctgctggtcgcattggaggtcggcaggttgttctgtgtacaccagccattgacgggcagacaactcaaccgatagcaccaagagcagttcgaggaggggtatttataaaaatcgataagcaacataatgaaaccaatgaggaccgcgactagggcgccagcacgaaccaaccaccacagccaccaaagagccttgcggcccttgaagaaaccgagcgggccgcctgtaggaccggggttttctgatgagtgggaggtgagaccccgcttgctcttgaagaactccatgaaggggatagtcttttgctcgggaccagcttggccagctccgccgctcatggcaacatatggctgtcgtgccagaccaatccgctcgcggagagcgttaggcgaccgcatgatagtcaggccaatggcgagacccatgataaagccaccaatgtgggagaagttgtccaatcctgggagaagaccaagaacgaacgagacacccactccgagaagcatgatgataagctcaacccacggagattcgcgctggggccagtcatacagcaggtcgagaagataaagcgcaaggataccgaatagggcgcccgagcagccatcactaggatcgagctgcgcggcgtagtttccacccaaaacgaacccgaagataccactggcgaagtaggtcaaggtatagcgccacatgccgaccatacgctccatgtctgcacccatagtcatctgaaccaacaggttgaatccgatgtggatgaatcctccatgcatgaagatggggataatgaatctgtaccactggttgggagccggccgatcgtctgttgaccctccaatagaggggttgggaacaccgctaaagccgcacacttcagacagtgtacaacccgttcccgtcaccgttgtcgatgtggcattcggacagagccacgaaagggtataattggcatcttggattccctcaacgttcttcatgcacgggttgtagcgtgctcccatgtatatttggacgtatggtgagggcccgatcatcggattgaaggtaggttttgtctcgatcactgaccctgtcaactgagctggagcggaaaagaatttcgttagttagtccgaaatgtgggaatcgactgagctaggaacagaactcaccattcttgaccagttcgataatgaatacgatgatctgggctaatgtcaagatgtatgtcacccaggcaatcttcttgctgaaaaatcccttcttctttcggccgtcacgttgtcggctatcctccagaccccctggtgatggagggtactgcgtctgttggcgcatccaatctggattgtttccatactgggcattggtcttcagaggtatattttctgcgtaattatcgccttccgttgcgcgcccggctgtctggtaatgtccattgtccgatgcaaatgactgttgactctctcggttgtgataaggggctgagggatcgtcgtgattgtaaactggggttgcgtagccgagtccaggagctgtgtgcggggcgttatctgtctttccggggacagcttggtcgtagctggggggttgtgggatatttgcgtgatagtattcgttggaggccatggtgcctggggttgagtctttgttttagagttcgggagcaaaaaggcgaacccgtgaacccgttaagatggttatagagagcttaagtggtgaagagtatatataacaaagagcaacccagatgaaagaaaggtaaagtcaggcagtcgcattattcgcgaagttatttttgggcggatctacgcaatcccagcaatgccacagccgcgtggctggggcttttccaccgaggattttccactccgccctagcggacctggttattggttacttttccatagggctgctaacgaaggggcgacaaaattgcgtcgtatctgactaatttatacttgctcttttctataaagataatctcgaataaattcccaaggtcccaaggttgtgcctgatccttacattccggcttacgtaatacacagtaaacagcctgccaaggctcctaattgggattagtgccctagatgtgaaaccttgttttcccagagtgggggctcaggccgtccacgtgatgagaagcctttttagtcaaaattgtgcccagaagagcttaggcgttctataaaaatatccaaggttgtagcgactcaactgttttggaagcctctgtagcaaagaaggtctgctctcggtcaattctttgattttaatgaggtgtgactgtataacttatggacaattctgctagagaaaccggtaccccacaagatgatactccaagatggagcggagctaaaacgtcacctctagggaggatattgtttaatgtggggagaaaatctgcgtagactactaacgattattaggtttctgtcaaagagcaaggtaaataaagcaataaggtcattatgatatgtagagtatagaggttctcctttcttttagctttctttccttgaagataatgtaaatgctaactagctagcagagagaatctaattgatcaaatgcggtatttaatactagctcaattatacgaaggggttgaagtgaaaactctgcagattagcacaaacctacaatttaattttgatctctttgatctatcactatcaatttagatagctctcatagtgacctctgaattcatggggttgtaagtcatgtgaacgatattaagaatacctaactagacatacctaaagtagtttagcggggactgtaacaatattgcgtcggtagcccttcttttcctctttcctctttcctctttccacctcctgcttcattgttgccgctatgacagcagcacaccagagcgagactgaagataggtttcttctcctgcgcttccttgcaaacattgagatcccagagacgatcaccaaccatgtctacataaccaaccttcaatccccgatctcgcgactgagagatcttcgttcaaatcgaagtcagctccaacaacacctgagcgccagtttgttacctttgtcaatgtcggaataccacaatcaacagcttcgagatcagcacaacctagattcaccagtgtgacatataaatctcgcatgcgttggctctaaacgaagactttatcttgcaactcgtgaaaataagacgtatttgcgaactcactatcggtggtcagattgactctgcaccgacatatgtagcgtcagaccaatacatcatctttatcagagaggcgttttagaatcgaaagttgcgccatttcaattgaacgacaaggtcaagatactagagagtaaatggcaaggctctaaacccctcgaccaagatactatcaacacattcaaagaatgtttactctccaacctctgccggttatcatcccgggctaggggcgaggagtatacacaaaagtcgagttctttctactactgtcgatcagcagtctatcacaatctcagctcactggaccatttctccgaagattcttataacatcttcttttattcctaagtcgtttgtcactgtgtgtatcacgcatacaaaatggagtgaattgtctgaattgtattgaggataagattcctaaatcattggccccgactaccagcaatctctctacttcgtctactcgcaaacccagttctgaatatataatgacagaaacatgcactctccaacttccaccgaattggataaaacaaatagagctccatttgcacgaactctacggtagaaaaggactaaagtgtgtcgaatttcgtacagcgtaatttaccactagaccataacaaaaaccaaggttcctgtttagggcctagaggggccatatcccattcttgacagaaaacattgatgtcggaaggaattgcagacaagatgtgctgataaatttcctcgggttcgtcggataaacttcatgatccagctgttggtttgtgaattctagagcaatcgacctgagtgcaagaagtctcaagagcttgtcctcgggactgagtattcgatctccttctacgcaccttatgtgctcaaatcgaaggtcatcacagtttcgcttgcgagatagtagctggcttaggaacttctggccagcttcctatacccagcttgacaaagtgttcaattaagggtccaggtctatagttcggagatgtgatcggcccgtgtttcttcccaaggttgggattctgccgctgatgtcatcgccatgtttcatcttccccgcgcctgcgacatctaatagtcaacaccatcaccatggacgaccctcttatccaagcattgcctccggctacggactacctgacttatcttactctgctagaatatcagttaacccccaaacgtctgccacttttgcacaccctcctgcaagatgagaagcttacgacgaacatcggctgggacttggtcaagctgctgctgcccatgctaccagcgtccacagaatgcctacaggatgtggctcgcctaggcaatccccgagaagtgatcttgcgcgtctctgagtctttgatgcaacttcagccggaggacgcggacgaggatgaaaaggctggtcagggactgcccttgcacatcctacaattcaattgtcttctcggcatgctttcggtacttcacacacggatccagacaaaagcgccaagtcggttcatagcaacctccctccaagcagcactggaagcgtatgccacaatggtgaccaatgagaccaccctcgccttcctcgagttcttccgcgaagtgtccccctccaagcggcctgcaccaccccccagaactgctagcgagtcgagcgtcctgaaagttgccgctgcctccgcaccagaccccgaagctgaggtatccacgccctctccctctaccgataacgaaaccctccttgttcggaagttcattcagttcggtttgcttgaactgctgaagtcatatcttttgagcttctccagtccaatggacccgggaatgtcgtggaccattcgcatgcaggaacacctgcatccggatctgcggctacccggcaccaaatcgcagaccgatgcatatggatcgaccaaggagctcaaggagcgcgatatggtgatgggaaaacttatggtaagcaagatattatgaccggcattatatcaaattggaggacgatttatctgactttgcttctgcttaggctctatcgcgagacgttggaattgataacgaggaactcttgtcaatcatatccggacccccgacagatcagactgctccacttgatttcgatgaaccaccaataaaccccaaccagattccgctagaacgccatggttcactcctactactagcggctcgagctgcaggcgcaactctctttacctctgggcaaccgctccgtcaggtatccgttttccctgagctgagtcagatatttaacaactttgtcggcggccacaccaatctcgacgaagtggctttcggtcaaccccatgcgcttctcgactccctgctggctttgactgtctacgcactgcaaacccccatcgaattcccgtcaagcgataccgagtttaaggatttcgttatcatcttgactgcatgcacatcacgtcagagccacggcatagttcgccagatcccagctgccattgtccagagccatccgtcagctgagacgcgatttaagctcatatacaagatcttggaagatgaccatcttgcctcggcgcgggatagcgccatcgcatggctgaaggatgaaatactccgcagtccccaatctgccgacaatatattccaggatcctctctacttctgggctctactgccggctcttttcaaaccggtcactgccgccagctcatcatccgatctcgttgctagctggtctcgtctaacccaaattcaaggcccaccacttcattctgcgttgaatctgtattacttgctgctttcctcgccatcgctacgtgaccggctccagctcgacaagacttctaagttcttccgtaaccatgtcctgaaccctctcaggcaagtgttccagagcttcgaggacgatctcaccgccaaaggaggcgagggtgttattgaagctgcggtgggcgaggagatgtgccagattggcaatgcacggtctatcggacttattggtcttacactagatcaaatcgaggagacatccagcgatgcatttggttccgatgaaggcgatctgggcgaattttccgaggctgaagaggctaaggtgtctgaaatccggaagaaggtggatatctgggaataagtacagatccaggttccttgtacagaatttagtagatatgatgtttctacgaatgaacgctttcgtcaccttgtatctaaatttaatcagagtattacgtagctgatgattcggtccaacataaggaagcacgaggcttgccccctgtagaccttttcctctcgatacagttgagctacaagaaatatctaaggaagaagattccttgaggcaatgatccattcctgtcaactatcatgaccgattctaactaagaaataaagccttatccacccaagccacccccgaaacaagaaacgaatccgcaccacattgcaaaagagaaacacaatcaaccgactttaaaaaaatatgtaatgtgaatccccggatatagttgaaggaacggaaaagaagttcctttttaaaagaaacgttgtcacccgaatcgtccacgaaaggttcgaaagagcacaacaaatcggagtcggcagtcgtgaagaccatcggaagaaatgagctgtctcgtcgaagaaagaatgaactggacagatagactcgcaaagagtcttcacaaaagcaaaagcaaagctgagaggtcatgtttcgaggggttgatatttttggttgaaaagttgaaaggagtctcaagagtccgcggcgaagattgcgaaaaaaaaatgatgcatttcaatgtctatcatggtgaccaacgaaccaagtcaggccatggcggttgatggaatgttggaattgggcgctctcatggagggtgtttagaagtcagcggctattcacgaagacatgtcagtatataagtcattattggggaaacaaatggtactcacggttcatgacgacgcagccgccaccgggggacttcatgacgacgcagccaccgccaggagaccgcttcatgatgtcgcagccggctccgggggttctagtgaccacgcagccgttgggaatgggagacttcatgacgacacagccaccaccgggggacttcatgacgacgcagccaccgccgggggctattgagatgacatgtcagtatatgaatgtataaaagagatgacgaagcattgcatgctttggaggcaagctactcacatcgcttctggacctgagcacgagacattttcgaagatcgagaagagcttaagaagctgaagattgaaaagattgtaggttgtttaaatgagaatgtgagcgggtggtggaggaaatcattgaaactgggtgtagaagatgatacttatactcgacgagggactatttttcggactatcaatacaatcgagatcctactcaaggagtggaagttaatgcaagagtcacattgagttgctgacttgaatgcattgggcatccatggattgtcgaaggcatagagtcaatctagaatgcatgaggttccgattgtagtggatgcccattgcggggctggttgatattgttctcgggttcatgaatgtaggcgtcgttgcctctggaattggctctttgttttgatagtcagtcagtgcatctatcgggggacgtcgatatggatcgcatcgcttatcctccgaggcgtgtctttcatgaaggaacgccacagagatggccgaggaacccctgttccaggcacgtgtagttagcacattcaacagtctttcatggggtaagaacaatattaagccggggtctcaagtaacaaagaacatttcggagtatgtgtttgatttcgcccaatgaggatggcatcgtgaacaaagaaagcttaggttgaccaatcgccacaatcacatttctcttacgattgttcctcaggaacaatatcatgggccttggcatcagacaaatttgagatcatattgcacggtgttgagtatcgatatcattttcactcagaaacatcaaagagcacatcgctaccaaaataaagaggaagttagacttcgcttgggctaaacaatttagctaatggaaatgtcccaattcgagaataaatgatataagcaatgataacagtcccaaattggcaaatgcaatctccccttaggtgtaaagcggctcggtcacgtcattgagagtcaatcccgacttggcgacgtcttcctcgatcaagaacatcaaaggcatctcaacgagagtacccttgacttggctaagcagctctttgacctgtttcgccccctctgcgccaggcgcaaagtcatcgctcacaacgtggccccattggaatcgcgctggacgtgcagatccttccttgccttcagggcttacctcggtcttgtggaaatagtactcgtagaactccttgtactctgtccagttgcggattgtgtcgtccggaaccgcgtggaataccttccggaagacttcggtgtttgtgtgcgcccgtgagttccaaaggctttgagcagtgtcggcaagcggatcagcaacgatcttgctctcagggcagtcaaagtcgaagttgttgggaacccccacgggctcaaagttcgcgtccggtcgttcatagtcttgcggcggcaaaagtcccaggtgcttccggaacaactggcggcggagagatgaagcaaaacgactggcagtccatggcttaccatccatggtagatgccacaggtgtgaaatcctcgatgatgactgcgatctcagagtcgtgatcacccaattgagaacggtcgttcagatttgcggatccgcaaacaactacacgatcgtcggcgatcatcacctagtgctttggttagaatttaaatcatcgtcgaatttggcgggaaacgaacctttgagtgaacgtaaagctcttcgctcacaaacgcattaatctcggcatcgggatggccatcccacggcactttacgaatatcctctccgttgagcatataacattcgctcacactgtcccaccggcccgaggaagcatgaccgccctgtacctggcgtgcagcctgctggtacttctcaaagggtgcggtagtatcgaaagcactacgggtagtgctcggggcatatccaccagggcccgcagtgttcaaatcgtactccctgcgggcatcctcgtatttgacgccactctgctgttcagctgcagccatgataccaccgttgttaatccgatcgtaattgcgaaggttgtagaaacggatatactccatggggttaaatccttccttggcaatcaacttaatgatacggcgaccaccgcggttgatggagttgtactggaactccataatcgcacgtgttccgagagtagcatcatctcgcaaatcaccggcaaagcagggaacagacgggatgaccacgacaatcttatatttctgaccagcacgggcagcacgtagaattctctccacaattgcggcaccgatctgattttttactggatgctgcgaattaccggtcgcagtgatgaagaactggttctcgatgtagacaaagtgctcactgtttcggatgatggcgcaatatgcgtcggcaattgaatgctcaatctgggtgccattgctccatttcgcacagctgcgaacaatctggcatgacataccccctcggccttgcgacgaggaagggcggccatatgtgaccagtcgatcctggtattggtgaatttgtccggcgagctgaccacgaagggaggtgccgtattgggtcagatcctctcgcaaccgacgaggcgcgaagcctcgatcacgaacaccgaagtggctttcggtcaaccccatgcgcttctcgactccctgctggctttgactgtctacgcactgcaaacccccatcgaattcccgtcaagcgataccgagtttaaggatttcgttatcatcttgactgcatgcacatcacgtcagagccacggcatagttcgccagatcccagctgccattgtccagagccatccgtcagctgagacgcgatttaagctcatatacaagatcttggaagatgaccatcttgcctcggcgcgggatagcgccatcgcatggctgaaggatgaaatactccgcagtccccaatctgccgacaatatattccaggatcctctctacttctgggctctactgccggctcttttcaaaccggtcactgccgccagctcatcatccgatctcgttgctagctggtctcgtctaacccaaattcaaggcccaccacttcattctgcgttgaatctgtattacttgctgctttcctcgccatcgctacgtgaccggctccagctcgacaagacttctaagttcttccgtaaccatgtcctgaaccctctcaggcaagtgttccagagcttcgaggacgatctcaccgccaaaggaggcgagggtgttattgaagctgcggtgggcgaggagatgtgccagattggcaatgcacggtctatcggacttattggtcttacactagatcaaatcgaggagacatccagcgatgcatttggttccgatgaaggcgatctgggcgaattttccgaggctgaagaggctaaggtgtctgaaatccggaagaaggtggatatctgggaataagtacagatccaggttccttgtacagaatttagtagatatgatgtttctacgaatgaacgctttcgtcaccttgtatctaaatttaatcagagtattacgtagctgatgattcggtccaacataaggaagcacgaggcttgccccctgtagaccttttcctctcgatacagttgagctacaagaaatatctaaggaagaagattccttgaggcaatgatccattcctgtcaactatcatgaccgattctaactaagaaataaagccttatccacccaagccacccccgaaacaagaaacgaatccgcaccacattgcaaaagagaaacacaatcaaccgactttaaaaaaatatgtaatgtgaatccccggatatagttgaaggaacggaaaagaagttcctttttaaaagaaacgttgtcacccgaatcgtccacgaaaggttcgaaagagcacaacaaatcggagtcggcagtcgtgaagaccatcggaagaaatgagctgtctcgtcgaagaaagaatgaactggacagatagactcgcaaagagtcttcacaaaagcaaaagcaaagctgagaggtcatgtttcgaggggttgatatttttggttgaaaagttgaaaggagtctcaagagtccgcggcgaagattgcgaaaaaaaaatgatgcatttcaatgtctatcatggtgaccaacgaaccaagtcaggccatggcggttgatggaatgttggaattgggcgctctcatggagggtgtttagaagtcagcggctattcacgaagacatgtcagtatataagtcattattggggaaacaaatggtactcacggttcatgacgacgcagccgccaccgggggacttcatgacgacgcagccaccgccaggagaccgcttcatgatgtcgcagccggctccgggggttctagtgaccacgcagccgttgggaatgggagacttcatgacgacacagccaccaccgggggacttcatgacgacgcagccaccgccgggggctattgagatgacatgtcagtatatgaatgtataaaagagatgacgaagcattgcatgctttggaggcaagctactcacatcgcttctggacctgagcacgagacattttcgaagatcgagaagagcttaagaagctgaagattgaaaagattgtaggttgtttaaatgagaatgtgagcgggtggtggaggaaatcattgaaactgggtgtagaagatgatacttatactcgacgagggactatttttcggactatcaatacaatcgagatcctactcaaggagtggaagttaatgcaagagtcacattgagttgctgacttgaatgcattgggcatccatggattgtcgaaggcatagagtcaatctagaatgcatgaggttccgattgtagtggatgcccattgcggggctggttgatattgttctcgggttcatgaatgtaggcgtcgttgcctctggaattggctctttgttttgatagtcagtcagtgcatctatcgggggacgtcgatatggatcgcatcgcttatcctccgaggcgtgtctttcatgaaggaacgccacagagatggccgaggaacccctgttccaggcacgtgtagttagcacattcaacagtctttcatggggtaagaacaatattaagccggggtctcaagtaacaaagaacatttcggagtatgtgtttgatttcgcccaatgaggatggcatcgtgaacaaagaaagcttaggttgaccaatcgccacaatcacatttctcttacgattgttcctcaggaacaatatcatgggccttggcatcagacaaatttgagatcatattgcacggtgttgagtatcgatatcattttcactcagaaacatcaaagagcacatcgctaccaaaataaagaggaagttagacttcgcttgggctaaacaatttagctaatggaaatgtcccaattcgagaataaatgatataagcaatgataacagtcccaaattggcaaatgcaatctccccttaggtgtaaagcggctcggtcacgtcattgagagtcaatcccgacttggcgacgtcttcctcgatcaagaacatcaaaggcatctcaacgagagtacccttgacttggctaagcagctctttgacctgtttcgccccctctgcgccaggcgcaaagtcatcgctcacaacgtggccccattggaatcgcgctggacgtgcagatccttccttgccttcagggcttacctcggtcttgtggaaatagtactcgtagaactccttgtactctgtccagttgcggattgtgtcgtccggaaccgcgtggaataccttccggaagacttcggtgtttgtgtgcgcccgtgagttccaaaggctttgagcagtgtcggcaagcggatcagcaacgatcttgctctcagggcagtcaaagtcgaagttgttgggaacccccacgggctcaaagttcgcgtccggtcgttcatagtcttgcggcggcaaaagtcccaggtgcttccggaacaactggcggcggagagatgaagcaaaacgactggcagtccatggcttaccatccatggtagatgccacaggtgtgaaatcctcgatgatgactgcgatctcagagtcgtgatcacccaattgagaacggtcgttcagatttgcggatccgcaaacaactacacgatcgtcggcgatcatcacctagtgctttggttagaatttaaatcatcgtcgaatttggcgggaaacgaacctttgagtgaacgtaaagctcttcgctcacaaacgcattaatctcggcatcgggatggccatcccacggcactttacgaatatcctctccgttgagcatataacattcgctcacactgtcccaccggcccgaggaagcatgaccgccctgtacctggcgtgcagcctgctggtacttctcaaagggtgcggtagtatcgaaagcactacgggtagtgctcggggcatatccaccagggcccgcagtgttcaaatcgtactccctgcgggcatcctcgtatttgacgccactctgctgttcagctgcagccatgataccaccgttgttaatccgatcgtaattgcgaaggttgtagaaacggatatactccatggggttaaatccttccttggcaatcaactccatgatactgtgacctccgcggttgatggagttgtactggaactccataatcgcacgtgttccgagagtagcatcatctcgcaaatcaccggcaaagcagggaacagacgggatgaccacgacaatcttatatttctgaccagcacgggcagcacgtagaattctctccacaattgcggcaccgatctgattttttactggatgctgcgaattaccggtcgcagtgatgaagaactggttctcgatgtagacaaagtgctcactgtttcggatgatggcgcaatatgcgtcggcaattgaatgctcaatctgggtgccattgctccatttcgcacagctgcgaacaatctggcatgacataccccctcggccttgcgacgaggaagggcggccatatgtgaccagtcgatcctggtattggtgaatttgtccggcgagctgaccacgaagggaggtgccgtattgggtcagatcctctcgcaaccgacgaggcgcgaagcctcgatcacgatcaccttcgtactggtggtagtcatcaattccacgggtgttggagtgggatgcttcctggcctggtgggggtgggtaatagggcgtctgctcctgttgctggccatgatagggctgatacgaggcgtcggcactggattgcgctggtggtggaccaggcggaggaggggggaatgagttcccagtgtagctgtactggcttgcgtcatgaccctgggactgagcggattgcggttgatagcccagaggggtttggcttggcactgggtggtaggttgaagcattctcagcttggtacgagggagacgtgttctgctgctgatattgatgctggtttgaggagatctgagtcggcgatggcgcataacctgaagtgctagcactggtgtgaggctgatatacgccggcaggttcttgatgctgaggctggggttgagattgcgagtgcgactcctgatacgaactcgacgaagtctgacccggtggcggcgggtaggtaggtgatgcgactccactgggcttctcttgccaggacggcacagttgactgaccctgcgtgctcgcctgccccgaggggtacacgttggactgaggctgggtctgagattgcgagtgcggctcctgatacgaagccgacgacgtttgacctggtggcggcgggtatgtagatgatgatgcgacttcactgggcttctgctgccatgatggcacagttgactggccttgtgtgctcgcctgtcccgaggggtacgagttggactgaggctgagactgggattgcgagtgggattgcgagtgcgactgtggctcttgataagaactcgacgacgtctgacctggtggcggtgggtaggtagatgctgatgcgactccactgggcttctgctgccaggatggcgcaggttgctggctttgtgggctcgcctgtcccgaggggtacaagttgggctgtggagaagcagcctgctgttggccagtcgagtaagcgggccttccatggagtgccagtctcgtgtatctagattcattgcgaatcttgtatttcaaatcatagatgaaattccatcgctccacaaagtgacgtcgcaaatcttccacggctgcaccgtgcaggctcacggatatatcagaccatcccatccgagacatggtctttctgtccaactggttattctcccaatggacaacatcttcgaaatcaaggacgcgagaattgttgtagtcctgcccagggaacacagtctggttgacatctgagggatgtagatccgagaggttatgttggtttgtgtcccagcgaccgaagcacaagtccaagccacccatgaatgcaatttgaccatcgatcaggcaaagcttctcgtgatgagcccagtacagaatgacatcatcgcgcattccgtacagtcccttcaatgtgtcctttgacatcttactcaaacttttcgagtcgagtgacaggttctgcaaggttgactcgatgtcagctgtcatctcctggcggtcaggcaggtggtcagggtgacggaagacagagatattggggtgcaaatcttctagggcatgttttgtgtgagaagaagacactgtagggactgttagttggattcttttcaatgttcaagaatcatggacatacgagtgagcgcctgcgtaacctccttgtaaacgatgacattgacgcgcacgccccgctgggctgcagcctgcagcatgcgatccaatcggtactgttcattcttcgccggtggccttctcagataaagttcgggagataaccaccctacattaagttagccgcatgcaatgtaaatccggggaagattgaaactcacagtccagaatccaaatcgactctcgggcgttttccagagcccgcgagacagcccagaaataaccgcatccatccacataccacttggcatcgttatgttcccggacaggggcgaagctatcaaatcgatgctctgtgttggtattgctgggaccatactgggcatacgcctgtggatcgatggtggtaccgatcttctgggcaaattcagaaccaagctcggtcacagtaccttgaagtttctccaagaaaccggacagtttgtcttccttttgaggtttcccatagtagttagggttttgttgctgtccacttgtgctttggctctgatcatatccgtattgcggttcggtctggctctgctgtagagaaacggttagttaatgtaaaaggtggaggagggtgaagcctacgccttgataaccctggttacctgggccggaggatccgtggctcttgtaggtgtcgcggaacttcttgaacgtatcgcctagaccgcgggaaccgtctccggacccacgttccgagccctggtagtagccaccataggccagatcatcctggttggacattttgacggctcaaagtagtttgtagatgcgataagataaagatcgttgaacaaacagaaagaaattcagaagagtcaagaaactaggatgcctgcggagcggggtgcgactgttttaaatcgtatgaaggccccgctacccagcccagccacgatgggaacgtgttggatgtggcggtgtacttgtacgtactcatgagatggcacgattatctttccaagttgggatattgctgtattcctatatataggcaatagaataagtgagactgttagatgtattcttactaaatggcacttatccgagtacaaccgaggatatgtagatatgtcacacacctttccctccgaataatgagctatttgacggcaaaaaaagacaaagaaaacaagaagctatattctgaaacaaggaaaagccctatatcaaacaagaatgagtttcaggttcaaacatgaagccaagtgtacttctgcttttgggaatgcgggcttggcattcggatatccaggaaccccccgaggtccactatgaaccttcataccctcaatggtacggagtacggagtactgcaatgcccacaggccaagtaaaacgaacctctcttgggcgaccccgaaagccagccgaagatgcaaaatccgtgaggccccttcccggcgagtggagatcagaactcggtctcacctctggcacagatacgacgcgcccaggtccgtgaagcgcagcaggcataccgagctcgccaacagtcccagctctcttcactaaaagctcgcgtagagcagctggaagatgtgcttaatcagctgagtcagacggtacatgcattcgataatcaactcatccagcatggatcgcaatggtctcagcctcaacttctccagacagtccagttgctgcgggatgatataatgtcccatttcaagcgtgccgatattcactttcaagagtctacagaggaccaaccctcagaattatcccaggctgttaatgagcaaccccacgcgctggtcgcgtccgaggtgtcagccggcagattaaaagatcacacttcggggtctgacttctggaaattatttttgggctcgtctgctggcataattccgtcgactaatacccagaacctggataaccaatcgaataacttggtttcaattcctgtcgcaccatctattgccgaaacacataccattcaatatgcaaccacgcccttcacccaacggcttttccgcgcttgcgctgaaagtggccatcgattcctgtcgaatctctcatataaagatgaagatatgtgggagtttggactactgctacaaagaatgccacgagcagagatccaacgttatttcggacgtgtcatagacatggaaccgtgcaatcctatcgtcgatggccgattcccatatgtcagcctcggtggtgcaggaacccactttttacaaccttccagtgactccttttcagatagcttcgccctcttccgaatagcaaatggcgtgtctcatgttcctgccgatgaagactggtttgatgtgcatgatgttgagagatacctgctcaacaaaggcattattgcaggcgaatttccttccgcccttacgatatcttatccgtttagtccggatgccaggccttcgaacctagagatccctcaaggcgaattacctggcggtatgatgatggtcatcgacgagtataaattgatcaacagtatggttacactgttgttgttattctcggtgaatataatagaagctaacatagccaggattgagccagcttccagtcgctctgggctgtgtggctggctttcgccggtctgatgtcgagagggtagtatcccacaatgtgaggtggatctcagttggatttactggctcgacagggtaggcatgtgtgcattaatttatttgaacctgcggagtatcacaatttcctatttactttatacacgcaataaatcagacacaatctgtttgtaaccatctacttacccttgtttcgtccaagtcttgcgagttgctgcgacttcttccgttgattatatggccattcgacgccacaattgcaccaccaagtactctagattgagctagagccccagaccatgccggcggaaagatgtccgactcatgacctcctcccgccaataccatacagccgccacagtcgcacccggtccaattgccacggaacctagaatcaaaccagccagtgcgacctgccaagagacattggacactccaatgcggtacagatcccacacgctagccaggcaccacaggagagttgccaccgaaacaagcaggaaatcgttctggaagaacacgaagacaccgtccgcaagtgttgccacctgtgcgaaggcatcggatgggatgaaggcccttgtaataaaacctgtccccaaagcagcccagctcagcaacaaggccacatggaaacaagcagatacaccaccggccacagcgtagagggtttgcaagtgtgggatgtcacggtttggtttgctctccgctgcggagctatcggtcttggccggtgtgcttgaactgatcgatttgatgacacgggagaatatgtgagtcaagataagcacgtataccggagcgggctgccacagcgcaatgaagacctgtcgcgtgttcggggcatcagccaatgggaagaacagcatcatggtaggcacgacgaatcccaaaatcaatgctggcagtatcgctcgagcggtggattcgggaagtgtgcgggtacttggggaaaagtatgctatccccgaagaaacatatgtgcttgatatgaagaagagcggtgcaatcaacccaatccctcgcaactggtatagaaccgcccacaagctcggaatggcaagaagggtccatttgttccttggtcggaaaccttcaaccgtccagatagcgataatcggcatcatcgagcctaggaagtacagaacttgaaatggctgctccggctttgaaaagttggagaccgctggcaggaatattgtcaccatgactttcaaaatgaggtcaacaggtcggattcctgtgtacacctgacgaaggggagcttcggttcctcccgggagttgaaccgactggttctggattgactggcggacgaaccccattgttccatttgctctgattgctgccgacaattgacgatggcctaaccaggctaggaggaagtatgcagcgtacaacaagatgctcaccacaccccgagatgacggtgttctaaagcgctcgtcgaaatatgcaatttctcgaggcctgtgcggcagtggaagcatgtccaatgacactgcaggagcatacgtgtcgatccatttgctgaggacagtagatttggagaagcgtggcaccacgtatcttgctatgaacttcaaaaagggcgtttccaggcactccagacgttgccgggcatgggatactttgatcaatccccatgcacgtttttcacgctgctgttgaacgccctcaaagattttggaaatttctgctgatgacagggtgcctgactggctgtttttcaaggccgcaacgagatgattggtcagggacgcggcggtttccattgcattattgcctccctggcctgtcaacggctcaaactattggacggggatattgttagtcttcgtatgatattttcggagataggtagtctcaccttgtgactggcatcgccgatagtcatagttctctggaaatgccatcttttatagacttattctggcagactgctgtatgccgaggcgattttgctcttatacagagcggaaaattgcagcgtgggagtaatctggtcgtcgaaatgttccgttgcgactgcctcctcctcttccttggtgaatcgagggatatctgcgccatagtacgttttgcccatgttccgcacgagaaaccagtaggtgagatctccgggtccgctgggaacaagatacgagaaatgctcattgaacaccgagttcagcgtgcctttctcgattcccttcactcctttggaaatgccgaagatgcatgcgtaagttgcaggcagatctttcacaatagttagttaacacttctcaagcgcttatgttttgattttcatactagattcctctgtgggatcaaaccatgtgggatctatcttttcggccgctttccacatttcttggcgcactttggaatggattccgtctgctccgaccacgatattcccggtgtaggtctgaccagtcgttgtggtcaccgtgacactcgaagtaccattctcaatactttgaacccgctgagaggtgagcactttggatttatcttggatctttttgtagaggatttctatcaacattcgtcgatcgaggaagacgatcggataaccatgactggaagtgatgtgagttgatgctgttcaatatcggcatatgagagacaaaccttccgattgaaacctcgtcaaggttattgaatgtccagaattgctgtccctgcgaatcacggaagcggagtgtgtcgacagggtattctgccatcttcataaccgactcgtaacaacccagctgatcgagaatgcgaaagccgtttggcaaaactccaaaactggccccgacctggggtgcaatgctgccgtacgcttcaaggatgacaaaatcgatgccattcctctctagcattagggccagcgaaagcccggcaatgctaccacccacaatgacgactttgaagggtttttggttcatgattgatgatcggaggagatttagaatcgaagatgcattgatatcctggaccgcgacttatatatgtcgggcgtaattgttgcaactaacccataatagaaagccgatcgtgtcaaacatctattgaactgcctaaatcggaggaaaaacgtgccgtgatcattgatcaacctgtcagccgggggaattacttgaatgatcaataatcggacccataggagtcaggcggaactaattacggacacggtgatccactatattattccatgattctattggataatcatattgatctacaatgtacggagtacatacggagtagtcgagaagaattaaaaagtacctctacctacaacatacaaagtccattgcatcaccagactgcgcaccggccagtcacagaaatcgtggtgccatggcacacgtattatgccttgtagggctccatcatgctaacaacgccaatcagccttcaaatgccaagcaattactagaataggtagatacatgtacctagtgtaactcacttaatagagtaacctagccgggtgaaaatccagccgtttcaattttcaagactactttgaatatgaaagaaagataattcattgttcagtatctaaatcagggaagtaaaggagaagaactactacattgtcctctttaccagatgattttctttgggcccctcactggatactgttggtctttcatgtgcttccatgctttgtgtctgtaaaattagcccaaccaaacacatttattagaagcctttgagatagaagcattgccttgtactttttgcacaaagctattcaccccccagtttatcagggctcgaatacttaatggacagatgccacagttccgttaacgctgaagagtgggaggaacaatcacagacatggatgcttggagaatctacaaaacctacagaatggagatacaaagagaaagtgtggatgatattctaggtaatcgtatatagaccagagagaaagagggggctatctactacaaaggagatttaactagaggtaattggcgtgcgccgttagcgataatgggacattccagactaattgatgctatgtatttataaaatcttcaccagcaccaaaatgtggactaccaatacagccgcaatccaatgctctccgctaagcaaatctcacagtcgcccgtaagggttataaggtagtatgtccgagtgctgatcaaggtaatcgtgggaatcatcaccactaagtcctcggagattgacaggcgcacttgtaaaaccctgttggccatgtctggatatccaccttgcccaaccaatgataagcacaagcccaagcccaataatgatcacagcgatggaatatcctattacaacggacttggacgcagatgaccaagtaagtccgatgcctccgttgacgatcgcgaggaagatgatgatatgtccaaagtagcgatggataatgccaaacctggtaggtgacttagtctgtttatatacccggtgatgccaaaatcccattccccactgagctagcattgcaagcagaaggataataccaaggatctggtgcgcggagccgtagttttgcgattttgtgaacatcgtgcttaggtaaaagccgattattatgccgacgatcgcaattgctgaagaaagtgtctggttgatccagtgccaccggacacttttcggagcaacacggaggagaacgacgccggctggcatcagaaggatgagagctccacaaaggcacagaccgtgaatgatgctaggccagttgctgtcgtttgtaattgatttgctcagcaccgagccagttgagtttgtatacgacgttggtagtccacccgaaccgccggttgcgcggaccatatccatagtgaagatgcctaggatgtcaaaacaaattagtgtccaggagcccgagtaaataccgttcaagtaagatatcacgaaccatattctgagtgtctctctatgtttgccgtttgagagttactgcgtagcatggcagccgaactaccagttggacctagcccaaaaatccacggctgagacgtggatttcaaatccaatgatccagtctcccactgggtgcagtttgagcacctagcattcacggtcatgacgttatcggagatacctgtaccattgagaatgtccaccttgatcgaagatgaatacacaggttcttgttcaccggaggagagacgagggctgaaggtaatatctaaacaggcgcgtcaggattgtcttctcagaggtatttgggtcacgtcaactcactttccccattggccttggagtagatcacaaacatgagagagtctttcatttcatttccagtcccgaccgcaatccatgaatagtccgtcggcccagacatgtggaagtagagatcggtggagccatcggggatgttgatagcaaaaatgaaattggcctggttctggctaagaggcagattgaaaatgctcgtagtagtcgagtcggacacggcagacgcaagggcaatagagtgaaataaatggcctgttaagagccagtgattctgttagataacatgtgaagcaataccaaaatggctaagcatcgggacctgaccgacctagcaaaatcacgacttcgggccttgtaggcagtcgcatgttggcaattgtaatctccctgtatgtcttggaaaggaattgaaaataccccaaagtgacacagctctaaattgatttcatcttccctctatttgacttcactatatacgtattccccgcttatctatgagtgacatctcgccttaacgtgattggcccggccagcatggtctgggcgttgaaaagggaacttgtcatttcctagggtctttttcagagtggatgcctggcactgccaccgtgatagtggagtttttggcttgtctaactagtataacgtacctattgttgttaggttccaggattaactgttttaactgttgtatgttccattaggggtttccacggataaatagcttatccggtcccacgatttattttaatgcttgtactaacttgtttaggcaatcttcaggtccccacatagccccacttccttgtgctgtcatatacttgtaacatcaaagttacacatacaaatgaggtaacacgtatgattcagcttcaattctttcagatctatgagaatataggtgaaaagtgactattcatcacacaagatgtatttcgtagatgtaaattttgctaggtagacggaaaaagacggaaaaggcttgattgtacaaccttgaatgaaccatagttagacattgccagtttccccgcagtacatctgtctcataacatcatcctcgattgccaagcaaaaatcagtcattcagcaattgaagatcatttacctaaatcaatccatcatgtctctcgcaaccctacatgtgagaatgcccattgtcaacccgcaaccccgctgacctcaatccagaccacagagcactccaatctccccgccgtatccacaattctcttcaaagccaaggcagcccacaagctgagcttcgaggaaattggcgagcacctcggtcgcaatgaagtagccgcagctgccatattctacggacaggccaaggcatcgcccgaagacatcgaaaagctggccgatctgcttttcatcccccagcaggctttggaggatcacctcagcggcttccccgatcgcggtcactccgtcgaaatgccgcccaaggagcccctcatctaccgactgtatgagattgtgcagaattatggttatgcctacaaagcggttctcaatgagaaatttggagatgggattatgagtgctatctcgttctcgacgaaggttgagaaggaggttgatgaggatggtaatgactgggctgttattactcttcgtggaaaatggtaagagtgtcttctctatgtgtgtgaacatcatctgacgaatgaataggttgcccttctctcggttctaggctgaaggtgttcctaggagctattgtattcacatggtttttatgactcccaacaggttactcctccaagttcttacttttctataccatcagtgagagaagtgcaggatggtagaaaaacgatagtcaccattctatcaagaatttagatatatctgacttcaggggaccaagtaaatccatctgagacagctcattgatgtatatgtagaaacctgtgttcagagttcatgtgtgtagagttacttaggagttagtaggaagcgttcagacagtgttatgttggttcgacctcaaaaaggcaaacgagcattgagataggaaagaaggaagaacaagaaaaaaaggaaggaataaggtatgggaggatcaacatcaaaaaaaagtccccattaatctagaccgttcctagacctcaggagggtatgtccaaagtacaaagtgcaatggtccatggtcctctcctccggcctttcccctatatgcctccactgaccgtactaactacgacctcccccctaagtaacggtggacggagtgccatgtccattcccgcggggggtttgcctagcacactgcttgcagtcttcgggagagctttagcatataggagtccgaaccgacagtggggagctaagcagtacccgttaaggcgaaacgtccgttgggaacgtaacgcccgttgagaacgtccctcgcaagggacgacccggccatactaccgctgggccactggggggggctggttgtaatattagtctttgtcttctttacataggacaaaaacttaaggaccaagtcacttgggatcttagacctccgatttatctgccttcctagttggataggagtttcaaatttagtacatagcatctacataagctgagctgtatataggctaacttttgagagcatctaaacatagaaaagtggtggttggcagccatttcaactctcgggtacatgcatatcaagtcaaaaatgagggtattcagacacccattttaggaaggcacgactacggtgagagctggctgaattctcaaagtcataggatcgattcccggcctcgtcaataaattcaatgcacttttttggggtttcctacctttttcccactatattgcccaatatcagaacaccatgacctccaaggctcttccgcatatgcttccacgaaagaatcccactttgtcaaagagaaatcaatgtttcgtttgcctcccaacgcgttaagattccgtctatcaccttcttgcttttcccctttcatcgctcttctagtattctggttctttcacatttctttccttctccaactatcttcatatcctatctatctcacttcatcaccttaaaggttctttacaatggccgaagaaccagaggaggtgtcttgtaccttccagggctgcagacttagcttcaagtctgccggcgagatgcaataccacaaggcgaatgcagacagacactcttactgcatgaaatgtgacctcgacttccagtctcagcaggccctccatctgcacaagattatgagcgaccgccactttgcttgccccgaatgctgtcttgagctccgcagtgaggctggtctggaagtccatatgagaaacgtgagtcgccatcctttatggcaacctccaaagaaacaaaaaaacagtactaacaaactcatcttttccagaatcaccaggaaggacgtgaagtcgcatgcatgggatgcggttgcacgtacaactccgcttctgcagtcatcaagcatatcgaagacaagggatgccccgtccttatgctgccagagaaaacccgcgatgccactagccaggaccttcccagcgcagcagcaattctgtccatgggtcgacattcgcctggaccacagtatccaccctctgaagcctctagcgaggaccaggacacggatggtggcgttccgctggatttctctacgcctcgtatggaaggaaagcgccctgctcgcgacactaactatgcaagcttttctcttgatgattggcccgagctgggcactccagcgactccagtcaaaggcaaagaaggaagtagctccactgaatcgtccggaggtgcccgcctcgatgatcttttgagttacgacagtccttccccgtctcctcgcggagctactaaccagtcgagcgaggctggatctactctggctgttcaagaagcaggcccttctcaccatactagatccactcgtggccgagctacagctcaccgcaagattcaaggtgtggaccctgagagcttctggaatcatgagaaaagtcgctactactgcaactgtggtgcgtctttcttgtacctcgccacctttgagtatcatctcacgatggaggatgaaacaatcagcgagtaagtatcttcgtttctatccgtttatcttgtgaagcaattctcactaacgatcttttttatagttgccctcgatgcttcaaacgattcaagactcttgccgcgctcgtcgctcacatggaggctcgatactccaagtgtgctttccgtgtgaccactggccagattgaacaggagctcagtgaagttactcgtggctttgccgatatctcgcggatgattggggatgatgaaacggagctgggcgagatcgatttcgatgtgagtagccagcccgagaacaatactaccggggcttcggatgcagacgccgcatctctgagtgcagatgatgtctctttgaacgcagtggccatctctttggatgcagatgacgttgcttcaaacgcagcagctgtatcttccaacgcaggggccgtttcccctaccatggaatccctagtgagtgattgggagggtcttgtcttttccgatgcacacgaagaaaatgacaaggaggacccttgaggcgaggtttgggattgagaacaggggtgggattttgaggatgagctttgaggatggtatctaggggttattcttggagggtgagcttcaagactagctgctacggttctacggattgaattttactgatatcaaggaaggatagaaggggaatctccacttttacatagtttcatagcacaaatcaccttgatcaaacttcttgcctggagtagagctagtatgcagcctctgggactcaactatatgaatcaacaatgacagtacaggtactacggaaaacaagatcagaaacgagactggatttcaatttgctcagctagaaaatggaaaataaatatgtaaaagttgagtccggactccatcttcacgcaaaggctccggcaaattgtcgagaacaagagtcataatggctaaataggcatatagagcatagaaaagcatataaagtagagcaatattacccatcgagcccggctagtccccaccctcgatatcccccgtcccaaggaatcaatcaccggacgaggcaaatacgcaaaaccatcgagcaagagcaaggtatcgagtatatcgaggggatcaagccgatagcgtgctagaacgaccacgcaactagcagcaacactcgcagcattcacagcattcgaagcagagaagaccggcgcaactagatgattgtcagtttggcttggtaagtttgtggtccggacgcatttggcttacaggccgcagcagacatcgccagtgccgccaccacgcagctccagcttcagcatgttctcctgggagttctgggaggatattagtctggggttttgtgaaggggagttgtgtcttgtatggcatacaggctgctcggttaccatggggtcggtggagggggcctttgggctgacgggctggtggttctcggtgcctgttgtggcatcgctggtggaggttggaatggactccttgaaggagaaccaggagaagagactgttggcaaacatcttaattgtgggatggagatgggagatttagagagatggtgagtggaaggggaggggaagttcaatgggggaagtaggtacctataggtaagctctggtattggatttgctaattgtatgacctcgagctgactaccaatagagtgggattgtctaccttgccaatcatgtatcaagctgaatttagatccttgttcttatgttatattcaatatttaatatttaataaacttgaagtatatgtggttatgaatattttacacagatcccggtgaatcccaagcgtagtatgtacatgtacttggtgtccttttgtatatattgtgtctttcccttctgttgtagtcagaaggagtaattcactatattcaacaaaattatatgtcaacatctatgatctatgtgaatccaaaaatagccttacgacgatcaatccgatgccaagtatcgtgccaagcccaaccgccaaccataaattttcctccaaccgcagcctccgcaatatcatcgacctcagaccaaaccaaaaatggcaaccccttcacccacagacctaaacgcctcccgcgaagcagactacaagcgcttcaagaactatgcagcctacacattcctaatcggtgcaccgatcctaatcgccctcccaccacgcaaactcgaccctctcaccgtcctagtactctgctccttcggcgcgtccgccaaccacatcgtgcacgaacgcacaggacgcagcataatcgaccggattgacgcgcgcatttccagcatgcagcgctcattctcttccctaccgagcgagcgcgcgcaggagatccaggcacgactccgggccgcgcgggatgcgcaaatccgcatcgctgagcatgaacagttgaaggcgcggattttgtcgctttcggataagcagcgccgggagccggatccggttttgatggaggagattcagaagctgaaggcgagacaggcgcaggaggaggacgttgtgcggcggctttggatgggtggggagtccgaggggtggaaggagaggagattgagggaagagcagaaggcgcttagtgaggggaagggatatggggatttgattcaggaacatatttgggatgtttggacttggggtgggaaggatgggaaggctggtgagggtgttacggatgagaatgtggctgagaagaaggattgagttcttcattctgcggtttatgtctgttttatgtgtcttgtacagcgtctctgcctctctccccaccttgatgtattatattttgccctgctttgcattgggataggtgtttggttgctttttgagttccacctgccaggaatttatcagtctgttcgtgttgggatgtccgtgtacaatacattcattcgaacaagctgcaattgtctacaatatgtatctactctagtattctagtgtatccccatcccagaatgtattagttacctgacgtcgaaggccatcgcctatctcgaaggatcttacagccagtctacggcatctacaagcttacagaaaatgaaccaagtggagaatgatagttctttatttcaaaatacatcttcgaaaaccaagagactccccacgaccatggcatcgcgagagactcctgatcggtacatgatatcccttctggaaagccatgagaccctcaacgaccatggcatcgcgagactcccaagccaaccaaatttagtacaaatcctctcatatccaataaaacaaagtatatccctcccataaacaaataaatgaaacatgaaatatatgcaaaacgcccaaaacagatggtataaatggcaagacccctcattcgagccgtgggatgaagatgagcggctggtttcttttgatgtagatgctgatgctgatgctgatgctgatgctgatgccgatgttgatgatagatgttgttggtcttcacccgacggggccatgggaaaatccggcaaactccttgttgggtgctcggtaaaaaccatggtcaggactgcactctaagtacagcttccttgatatcattcctccattgcacatgtacccattcgaatccttttcctccacgatctggccctccctgcagacggggccggtgcgccatctgcaccaggaccagacgatgtttgtgatgtgtcgtctgtcgatggagtcttccgcgccctactctgggtgggttgtcacccgtctgtgacggttcgtacccaatatgaggaacccagagatcttggggctgattcggaggtcggtgaatggtgaccgatgtgggaaagtgtgattccgttgttgatgtcgacttgttgtcttttcgtgaggcgactagagcagggttggctaagccgctgtctagtggagctcagttggggacgaagctaggatccaattcgctagctagtctgagcatgctctcggcctgttgtaaagttagagaaagtagttacattcagggtttccttgcaactttggagaactgatgactttgggatgaaaagctggagggtggaaagttgggggacggaattcggggggacggaaagcagagtgatggacatcaggttgatggaaagcatggggattgaactggaaattggaaagtgggggactaaccatttccttgattgcaacagcacccagagcgagggctttgattctctgtaaagaagttagtgcatgttgcagcccatgtgccgcttcccagagataactcactggatcagggagcactggatcgggaagagctggagcgtcgggcatctcgatgtcattctaaatccaatgttagcaatcgatcttcgacaagatggatttgaatgtatcaacttactggttcatcggatggtgcatcgtccatctgaacatcaatgtttgatgggtgaatgtcgaggttgtaattttcgttctggttgcggtaggctagacgtctccgattgccatttcgagcctggccctattatatattgttagtatcaaatcaacaatgcgtcgaggggacaatggggggagtacttacaacatttgcctgggcaggacgagagaagctcgggttgtaattcttccccttgtagttggggttgaagttctttcccttgtagttggagctccgctggttgttctcgttgccgaacccgtcgcgagaggtgtctcgctggttgttgtaatcgtgggtgccattgggattgccattgcgagggctccattggttgttggcgttgccgttgtaattgttattgcctcggttgttccaagaacctccgttgttctggtaagctcgtggcccattgggcacaggagatgggccattgccattggcattggcattgcgaggattggcattgcgagggctccattggttgttggagttggcattgccattgtggttgtagttgcctcggttgttccgagcacctccattgttctggtaagatcgtggcccgttgggcacggaagatggttggaagtgcatcttcgtggggttccgtataccaaagttatttttgtttggactaccgcagcctggtcccccggacgagtttcgtgcaagcgaggtcattcgattgaacttccaaaagccggatttaaacttgtaagatgcccgcgaacctctgtttttggcttgtttctttcccttagcgtaggcttgtttcttctcgacccagtgtggatttgtatagtggatttgtttggggaggaattggttttggtttttggttttgccttggctgggatacttcacctcaagaggccggtgactatctccaagtccgacagttaaagacaactccctgaccttggcaacttgcgacgaaggctgggcgatttgatggagtggaatatagatcttcttctttgaacgtgggagggccgagccgtgtggctggttggaggatgtggttttcggtggcctgccagcggccaagtgaggtttatatgccggatgaaagaatgtatacccaaagtggaagggtataggccccaaggaggggatgaggagcacttgcgaggcaaatgctagatgttgtgagatgatttttgattattggagtatgccgatgaccccagtgagaggtgaagaaggaaagaaacgagacgagtcggggggtgggcagaggggcttttataacactcaagctagatgtgctactaagccaatctaggaacggagcttgcttccacggtgataatatactcaattccttggattcgtagaaggtaaaaaaggcctagataaggcgagttgatatgagtaccatgatatataggaggcaggccggtatatcttgagcctagagcagagccgaactgagttaaaaccgaacaatgggccattgttaactataaaggcagacggacaaagaaccttcaggtcttcaacttcggctcgaccatttcgacagaggtctttgggacatctcatcagagctccgaagcctaggatggaatcggcctgtagttgtagagggcacatagacatagaaacacacatgtttgagtttcagtatcctgccttgtcttggaacccagacagagcaaaagctttgaagtgtcttgtgattactgctgaactcaagtcgttctgctgccggagaatagcggaggaatgatcgtgtcggagcacttaatcgaggtgcggacaacattctgtcggcgtatcacgggtcaaagagaagccaaagagaagtcaaagagatctcgtcggaacaataaactcaaatgctttcattctttgggtatttcggataatggctttcttccgagtacaaggcctttgatatgtaatggatgcccagtgcgcatatgtcatcgtgactgtacacctgggcaactcgaggatataagaaaatctatgaaagaaggaaaaatgtaaaacgatcaagagggagaactcatcaagccaattaccatataattccttggaactatgaacttgacctcggactataactcacttggacctttcaaacgaatagacaggttaggatctcaatatttctaatgggattcacgttcgaacacagttcttccgttttcactcgtgttttgttcttctgggccaagtttagggaagatggaagtatgatcaggccgatgagagactagaatcatatgctaatgagctagttatatcccatccagaattggacgttgcgcattgcagaatgttggcaacttcttgattgaaacatacgagagtagtcggccgcttatatgtctttttggtagtgttttctccccttctcggtttgaacagggatcagttagaatttctaagaatagtttcagtcacactcaatgaagcatcatggccgctttctcgaacctttagaatccgccaatagacgaagcacaagccctagagaaacaaaaggagaccagataaagaccagcatcactcatggtctccctcaaagcattcattttaaggcgatttgcgtcgtttctttttatccgcgtcatccaccaaatcaccatgtctcttgtgcccattctccagccttagccgtttcttccgaggcttgcatgcaatttgtgattcaccgtcattcgacacgagactgtcgcgcttgcgtttatccgctttggggttttctttcctaaaacgttgctcctccttgattttcagccgtcgctggacttctgctgagatatcctctgttccaagccacgtcgacgtgaactctccttcttgctcggttattggctgagaaggagattcacggtgtctcttgggggctcgttcttcttctgtggggtcaggacgggctgtgtcgttgtcccgagagattctgcgtctttttttgcgaatgttcgcctctgtgtcagtggattgtgtggggttggaggaactggaggaactggaggctgggagtgtagcgttttctaaggctgtcatgtcaatttctgtttttattgcttggtaaaggtggtgtaggttgctttcttgcgtctggggtaggagtttgataggacttactgctcatctaaagaagtgtcagtcagttatgggatcaaagaaagaaaatcgggcactactcacaatatgttttctagctatcttcagctggttcatcgccagtactgttttgttcaccattgacgagacggtctggaaaccattgacctctggagcaatctggtccttcaccatgcttagcatatcaaggtgagagcagaggaaggcctcatgacgggagaagatctggtcgcaaagaaagagccggtcagttacagtgcgcctgagaatgtccatattttcagtttgcgccttgcgcaacaaaagcgtacctctgaccaagggactggcgggtcatttgcattggacttgatctttgaattagcctttaaatgggcatgcgaatcaccgacgacttcgtcctccgctgtaggattcatggtgggcttaaagttggcagtcatggtgaagttgaagatcggcagctactccgcgccaagagttcggctttgcagatgacgcgcttccgggctttaactacacgacagagagtaggaaagagtagaagagagctattcagttgtatatctacctaggacttgttattcaatctgattctattgtctatattgttcgtttgtgtattgtccctatcccactcggtcctctgatgcgtttctcttaggaaagatgcaaaaagaagcgaaccacttgaaggtgaccacggcttcttgttattatttcaatctcattgtacattaatcgcaagctccgacgccattcatccatgctcaagacctaatcatatcaccataaacccagctattcaagaaaaataagtcatatagcggagaacgctctctcattaccaagcaccagcgtcaaagtcaaatcgggacaggtctttctgtgaatcttcgacatccttctttgctttcatgcgcatgtagaagatcggacagtcacgggatgagcagatgacctcacagtgaagactaccttggcaccgctggcactgagtccacagacgtccgaatcggacctctagatcagagaccttggtgagggtttttgtgtaaagttcaccgaggcggggacggcagttagagcagacagcaccgtccatctcttccttgctgacaagaggcttcttgcagcccatgcaggtctgggtcttcttagcgaacttcatcagtccgcccaggtttgacgccgctttggtgatagaccgtgtgtgctcgccagtgagcaactggcccgccttcttgcccaatatgggttcgaagatacggttgagtgggtttgtcagctggttgtcgaggtagtacttagtgtcaatggggatgttgttttccagaacgtagatgggatcttctgctcgttcatagcccttggaatcacccgcacccttgatcatgacgtaggccacacggtcaccaagtgttggcgcagaacctgcgtcacgcttgtgcatgcgttcagcaagttcgacgtgtgcctgcttgcctgcgtagtcctccttgcgtttcgacagcgcttttgtgatgactagtttcgacatatcgatcttgttttggagcagatctgaaatggtggatttgacgtagctagatattatgttagtttcttgatagctttattttggggatatatcaacttactcttgcgcaccatcaacatctcggtcaatcagaattttgttcagcacggtttcaatgacattttgaaccatcaggcagttatcacgccggacggtctcaataccctttgtgtccatcttgtcaggtttgtcggggtttgtccagtataatccagcgtatcgcttcttgttgatcaaaagataagggaagtatactttctcgaattcaagcttgatgggcgcaacgaatttggaagaaacaaattctgctgcttctcggccaagcttcattgcatctgctagttcagtgacgccaaatttgaccatgacggagtcggtgtcaccatagatgacttcagcatcgtgagagtaaccgttggcgatggtgtaccgtgattctacctcttgttttgtcttctcaatcatctgacggccgtaactcgtcgtactactggcaatgggaagacaaggcagtttacccactgtggcacctgtcagaccgtagacactgtttgcgctgaccttcaaagcgagttgacgaccgttcagcactgcctttttgaaagaatcggtttcggtagccaactccttcttcgcacgctttcttgccgacaacagctcttcgagaatctgggacaaaagtcctttgcgaactttggtggtgcaaaacatgtctccattgggagtgacgatgtaatcgtcatccttcttcatgttcaacttctcaatactactcttgttgagcagggtcgtgtagcaaaggttgtgtgcttgaatgattgaggggtacaatgatgcgaaatcgagggtcgcgacgggcactggatagtaccctcgcttcggctcgatgacagtggcaccttcgtagtcctgctcatcctggggcttggaattgggaataacaagttgctgctctcgagctttccggaaaagttgactgatgaacttgacttgttgtcctcgagacaaaaggaaattaaacggtacgcccgtaactcttgccatctctgtataattgaccaggcacatcaatttgtccattaatcgttgcggcagatacgcatctttcagacagtacactgccagtcgtcgtctcgaatccggggtaccgttgaacagctcagtaatcatcgtgtggtgaacgtcttccttttgctccttcaaaaactcccaggatacggaattaagggtataacttctcaactggtgatctctctgaaccaattggagaagatcaagctgaattctgccgtttgtattcgtctccttcgtgtctcgattgcccatttgcttgctcgaaaattttccactcttaacctctgtcttgaaacctttcaatctggtccaataggggaacccagtgcatttcaagtgcttggcgcgatcgagtaggtaggggaaatcgaagttggcaatgttgtatccgataataacgtcagggtccaccttttccacgaaatcgcgccaggcgtcgagcatcttctcttccttctgaaattccaggatttgggtattgacgatcagactacaggtatcgaggacaaaaacgtttctgatgaatggtttcgtctctccgtatcgagtaacaacattggcgatttggatgacggggtccacgttaggctctgggaagataccctttcgtccggcacactcgatatcaaaggagagaatgcgaagaggtgccattttagcccattccccattgggtggatgagccaccatgttgcgatagtcgacagaagcttcaatttggcagttggacaatcgttgactctgtccaagaagacgatatttcccagccatcgcctcgacccaagccattccagccagcccagtgtcaatcatgaagcgcaaaaggtattggatattgtcgaacgtgaggattccatctccacctgtaccggtccacatacccttgtagttcatgcttccactgccagtctccaacgcacctcgcaatcgagcggccaatttgggctcagtaaccgtaatcttgatataataactcttttggttcccttgaaatccgtagatgttctcgcgcattgtgagctgcacagacgagattgcagtgaagccctggcctagcttttgctctaggaaatgtttgtaagggtcgcaatcgtctttggtgaagctgacaggagcagcgatgtagaggtaatgttcaaagccggttacatgaaggcagaccgattgtcctctctatgaatattgttagatacgaaaactcagctggtagcgaatatatttacctcggtaacaccaaagagccgaatggcaggttttcccatcaggaatgcttcttccgcgtcaatctgctggaaacagatgttttccgtggcttcgtcgaattcaccaagcgggggacgctcccattgctggtctttctccgagttgttctccttcaagtcgccgatatcctgcgtcaacttttcgagcacctcctcctcgaattgacttttctgtggttgacttgagccaatctttcggcgactcatctgcgatgatggtgtgaactgtacagacggttcattgtcgagtttccgctttttgagaacgctagcagatttcaagataccgttagagttattgaccgcgtcgcccagcacccgcttctggggagggatgatagcttcaggcatgacggcaactcctagactgaggttcacggagtcacagtcaactttgtggtttgaaaacgatatgatatgagagtgggctcgtaaacttgagaatgtgttggggtaactccttgtgaaagtcgcgctgtcgcgccttcgacgtgacgtttacgcgtgggagtcacgtgtgataagataagctaaattgaaacaaagattcggggcgatttgattggtcaaaaggtccagggcatacccatttagctctagatatctttttttggcttcttataatagaagaggtaccttttaccttttattcaaattagaggtatacatatgaagagctacattgagtagataagtatggcatgccatcatataccccctcttgaggcccaccaagtccacgagtgcggaaacggatgactcgcctccctgtgcttggcatcgtatgaagtctttgcctacttctccattacgtctatttacgcattctcctgaacgtacagtttcagactctactcaaaagacctgagtctattttgccaagattcgcatgccccacgtccagagacattctagtagaacccgatggaagcagcttgagacaatcatagccccgctaggcttctgtgacatgtttacatctttttgatctcaatcccaacgtggcatctccgcccaagggatatttgatacctgtttatttctgtcttctttcacttttgcggcgtcgttcttgatcaaggagctcccatcttttcactgcggggcaacgatcagagcctccggagggcattacgatctatatcgacttgtgcgccggtctttcttctagttcatcttcttctgttcttgaaattatctgtgtaactcgcctctcattgccaatgacgccagcacagcactgattcaagtcttcattgcggtgctaattgaatgaacagtgtatcaatatgtcgatgtttcgatcagcagcagaaatatcatcagactcagattccaactcgggttcaaaagaaagtcaagttgaggaatctggaccatcaactcctcgacatgccacagagaatcaatctcgcgacctaaaaaaggacaagaccaagcaagtcccgaaagactctggttctacagatgcagactcttcgatctctttcagcgatagatcaacattaccacaagatctggctgtgaatgttgatcaacatgcaaatgttatgacagccgccctcttggaattttactgtcagagtcgggcagcagacatcctcaatgctcaacaaggctcaaataaactgttcagccgacacagtcccgaggctcagtatctcggcaagaaactctacaaattcaaatcacagttcttgtcggctcacggtatcttggccgacggcatcgacagagaggaaatggggccaagtaggcaaagttatcgggataacctcgacttgcttagtatatctgccctcgaggagatgaatttccatgaacccgatgcgcggccttccacaattggttccggcgagaacctcgccttaatcacaaagtcttcaacaaggagacccagcgttgaagacgtggagaatcctactctattccgacggaacactgaaccaaatttatcgtttaggaaacagcttcctcctcctaataaggtggattttccaaccgttcccttgaatctccccaacccttcgatttccctatttggcagttcgcccgtaggggttcctcttttccattctccaacatccccaccgtacaatcagctatcaagatattctgtcgaattccaggaactcaagatcttgggtcgcgggtccttcggcgaagtttaccacgtcacaaaccatatcgacgggcaagactacgccgtcaagaaaatcccactcagccaaaagcgacttgagcagctgcaatctgggggtcaaaatcacctcgaggttatcatgaaggaaatccgaacgcttgcccgccttgagcatacaaatattgttcgatactatggggcatgggttgagcaggcccatcactcacacctgccttcagccgaataccaccattctcacccagcatatgacaagtcgcagaatgactcgccttctccagattccccaaatgagtcaagcatggggattgtcttcggacattctgaaaattcaaatcgcgagtctcagtcaagctctctgtctgaagatcatagtttcaccgagagtatccatggctgggacagccacgcgactacctcgtcccatcagtggaagaaaggttcacgaaggggattgtatgaggaagatgatgacattgaatccatcccccgcgatgggaacacttctgttggccaaacatccactttcggggatactgacgacatctttactgatggtctgagccaagatcagtctaaacttcaagttcaaccccgctaccggcctggtcagcaaccccccgcagtcattcttcacatccaaatgtcactccaccctatttcgctcggcgcgtacctgaaccctcaagccagtccgaagtatgatgaatgttcactcgccaggcgccattgcttccacctcctgccctccctaaagctcataatggacgttgtttcgggcgttgagtacctccactcaaagggaattgtgcatcgcgacttgaagcctgcaaatatcttcctttgtgcaccagagactagcacagcagagatatgccttgcgtgcagctccaccgaaacttctcctaccaagttctgtcgtcctcgcatcggggactttggtctcgtggcagatatctcccacatcaatgaggcctcacagggcacaatgacaccataccgagaaggaccaaatatacagcgggtagtcgggaccgagttctatcgtcctccagccaatctatctgcgtcccaaaatgaccagagctcgccagtggattactttgacgaatacaaggtcgacgaaaagctcgatgtttactcgctcggcgtcattcttttcgaaactgtttatcgttttaacacaaagatggagagacaattcgtcttgagtgacttgactcgtgggtcaggccgtgatccatccgagcgcaccattttccctgcagacttcgctgccaagatcgattttggctcgatcgtgctggacgatggaatttcggtcgcggattctctcatgacatgtatcaaaagaatgttggaacccaaatcgcagcaccgatggaactgccaggatgtcaaggaacatttgcgggcgctgaagaaagccgttcgccgattcgaggaaacgcaggaataaatgcctgaaacaaagtcaaggaccaatgagcctgaattttaatatcatatacccaaacaacaatacaaatgcacaactctcctctatcaaacacacattgaagatcagcattcgggcctcggtcaagtagctctccccgcatttctcacaggccttggtcttccccgcttaaagccaccgtgtacttctagtaatcaaataatcaaaacatccacactactatctagcaatctattactaaataccatttcataatggccaaaatcctccgccccgcaacagctccgtacagcgagccccttctcccgcaactagacatccgcaacccctactatacaaacctgaaccacaacctgcgcgccaccgtgcgcgaatatatcgatatatacatcaccccctacgccgcagagtgggaagaagcaggccaagtccccgaagccgtacgccggcactattgcaagctgggctatagcatcgtgcaccccctcacgagcgaggaggactcagccggcctctctctgcctgggaatgtgccgcgcgagaagtgggatacgtggtgctcacttattgtaacggacgagctcacgcgcgttggatatgtcggtgtgatttgggggcttggtggtggtaatgggattggatgtccgcctgttgcgcgttttgggaatgatgagcagaggaagaggtggcttcctggtgttgcgaggggggatattcgattttgtttggggattaccgagccggatggtatgtggatgtttacttcagaggtataactatcttcaggatatgggttgctgactttgtttactttttgcagcgggctctgatgttgccaatatccagactacagcccagcgggatggcaatcactatattgtgaatggggcgaagaaatggattaccaatggtatctgggctgactattgcactgctgctgttaggaccggtggtcctggaaggtctggtatcagcttgcttgttattcccttggctactgccggagtgactcgcaggcgtatgcataactcgggtgtgaatgccagtggtgggtgcttctttctcaatatgacctgtgaagaaagacatcgccaatcaacacaactataggctcaacctttatcgagtttgaagatgtgcgtgttcctgtcgaaaacctcatcggccaagagaacaaaggatttccccttatcatgtcgagtgagttgccttaccaagggtctgaattggctgctaatattttcttcagacttcaacccagagcgccttactctggcgtgtgcgtcattgcgactctcccgagtttgtgccgaagatgcctacaactacgccatccaacgcgagacctttggatccccactgattgaaaagcaagcaattcaatccaagatcttcaaattcggcctcatgattgagccagcctatgccttcatggaacagctcgtgaacatccttgaacttaccaaagaccgtccttccgacgacgtcaacattggtggtatgactgccttgcttaaagtcatgtcgaccagggctctggagaagagtgttcgagaagcacagcagattatgggaggtgcgggctataacaaggctggcaaaggtgctagaatcgagcagattagtcgtgatgctcgggttcatgtagtcggcggcggaagtgaggagattatggcgggactggcgctgagggaggagacaaaggctattcgcactcggagaaaggcacttgagaagagacagtctaaagtatgaaagaaaatacgaagtcactcatgggtgaatgggcttgcacgagtttgtagtttatacctaacctagaattcatgcagtgaatagggataatgataatgatgactatataaggatagaacacaagcaggcattctatcaaccttattagacagtataaggctttgcattgataccgaagatcagatgaggcctctcagcagcaatcttcagaacagtctgcgcgaagaccgagttcgcccatgcgaaccaaggacgggtatagtcctttatgttggcaacattgatagattcgtgaacaagcccaagcaagctagaattacgaacgagattgaggtttccaatgatctcagcgtcgtcgtcagaggtcatagcttgaacaagtagagacatgggccaggcgtgctctagaccgatatgtggaccagcaatgccgtggaactgtgtacccaccagataatatggattggaagccttgtcggtgatcattttgcgtgtattcttgtagacggggtctgatttgtccacaaagccgaggtagggcaacgagagcagtgaggggatgttggcatcgtccatcagaatacgcgacccatacccgtcaacttcgaatgcgtagacatctccatatttggggtgtttaacaatgccgtgatcgcgaactgccttggctagcttgataccgcgttcctgcaggtccgcaacgagacttggggacccaccggctgccttgatgactttcgctgtcttttggagctgtacggacatcatagcgttgggcggaatgaagaatcccaggatcgtagcgtcatcactggggcggaatgcgctgcgaattaggccagtctcgctatttagcgggttgccaacaccagctaggttgagggtctcagtgccaatggtagtctctcgttgaaacgtgtactgattttggacgaactggccctgagtattgaatgtgggctgagactccgcgtcgatggtctctagcacagtttgcaccgctttataccagcggtcggtcaagaacgcaattgaaccagtattttcgtggaactcagtgcctagctgtaggaaatgggccagagagtcaagttcatacttgcactcaaatacaaaagaactgtcatatgcaggatgcacagtgtctttttggctactggcttctggcttgatgccgctgagagccggtggctggaaagcattgcaatagggcgactggatgacaaactcggactgagtgttgattgcacctagtatcagcgagtaaagactctcgtccttagcagctagtttctggtaatttgtgagctggttggttgagtcacgcagccactcggcgttgatatcgcccgtcacgacgaaggtctgcactccggtccattgcgcgccggatcgcttggcattggtgccggatgatgtcgatccgtttgtatgccaacgaattgtagtgtctaaggtatttggaaatgcatttcggaatagctgggcaagatctttatcgactaggcgcgaggtgatatcgtcaatgaccttctccaccgcgggcgatgaaaatgtccgacatggttccgcaggtcgctgaaagggaagattcaagggaccaccactatagggagcgctgtaatattgaagttttgtttagcgaatacttgacatatctcaatgggggtattgacactcactgcggtgttgatgcataggaggtgtagtctgggcaggcacgtcgcaagatggctgggtcgtctctgtctgggagagcgctggcctgaaggcccagcagagcgattgcgagtgccgtaggaatattcatggcgcaaatgtcaaataggaggaaaattatggacagacttgcactgctataaggaagaaggccggggttaataagaggggatgtgtgtcgatctcaaccggacagggatacattccactacacacatacaacttctccgtggctgtttaggagtacattttgacatataatatagaaaccttgaggtgattcgctcggagaactactaagtaccgtgcgaaattgaggtgacatcgctctacgcacgatgacacccttccccgcataaagtgcggagaagatcgacgtcgcggcatttccttgttgggtttatatacttgacatgagctggacgtatgctttagtattagatatctatgctctcagaaatgattgggcacctcaataatactacagaaatcacttcttcccaaagaacgacatgatattaccctgccccgcagctttgccagccttccctttgggaacattgaccgcaggcttcttcttaggcaccggctcatcctcggagaaagactcccacgtcgcctcttcccgggtaactgcaacaaattagtatacgacaaacgaaggggcctcagcgggttgcacggacctaagtatccttcttcatccttgaccgtcttcttcttcattacttgccgcttgcctcgccgccgcccgccctgtatagtcacttcttctttaagttcagctggcttggatggtggcggttgctcaacaggcgtgggctcccgtggctcctcatcggcatcaggcatttcctcatctggatccatgtcagttcaatatttcctcaaggtgcaatttgagatgaggacataccggcagcctcgtcatcatcatcgtccatcatcttcttgagcttttcctcgcgctctttcctgttttcgcgggttcctgctgctactttatcggtggaatcagggaacaattcttctgcttcttcttcagaggctacaaaatgttagctaatgcatcaatctaagtggggcgaactaaccatcttctgcaagaggtgtggcctgtagtcaaagttaatagaacaagatcagtaagagaaaaaaagataatattaatagaatgcagcacgggtgagggcacgaaccggttctgcgggggctggcgtctttgtctttggctttgccttggcgaaagaactgaaaatattgcctttctgcttggccggcgcagctttacccgaaggcttcgaggatgactgggagttggtagcagagggtggctcagacatcggtttgtccaacttagtagcttccgctttcgctggagatgcttcttgctgcagtggccgtttagagggtaccattgactcagtcgaaggcttcaatgccttgccagccggcgccttcgcagatggggctgcaggtggtggtggtgggtgcgcgccagtcctccgctggaagatagataaacattagatcatgatagacccgtcgaagtaatgaacgacctaccctgacatctcgattttgaatcataccccattgcttgccacactccaatggatcctcctgctcgtgtgtcctcgcaatctcccgactggcatcaaccaacacattcaaatccgggagagttgtagcctcaagactgtagacatgaattgtagatatcgactggaatgttgctttcgcatctggtcgattccttcagtaatcagttcatcaccgagacgaatctgcgtaccttcaaggtcttcctcgcgtgctaatataatagaggtagtgcgaattgagtctgaggcatcctcgtccggcaacgagccggtcgagtagggactactctgcatcatttcatcttcatcgtccgcatggccgttcgtaggggtcggttcgggcgctttctggataccggagatgacgtaggttgcgtggacggtttttggcttcttcgcgttctcattgcgatggaattcaaacaggatactatgcaacagagtatcaatatcagctccaaatccaatacccattgttgcgaacgtagaacatactgtttggcccgatcggcgtgtactttcaacgcgcggctcaataagcgatacgtgacctaattctagtaagctcctgcttgtctgaagagtgtgagaaaatcttacaagacgccgctcattgagcacattttcagccagatacaacttcgaatccatagttgctttgctgttgaagtgcaagttgctccgacgcgtgctcaaccacttaacgcgtatcagtcagcgggtcttggcatttgcggtctcctcaggcgacttactacccacttacaattctcctttttcggttgccttcaccgggtgagtccggttagaatttctacagaaaagagctccggagctcagggcttgggcctcaattcaatggatcagtcgttcgagctacccgactccaccgattggttggaaacgccactttcactacttgcgccgttcgaatcctcattacgatgtcaagtctgcaaagacttcttcgataaccctgttattacttcctgcagtcatacattctgctcgttatgtattcgccgttgcctcagcaccgaaggcaagtgtccggcgtgtcggagctccgaccaagagctcaaactgcgtcgcaattgggcaatgcaggaactcgtcgacgcgttcaaattggcacggcctagtgttctcgatcttgcgaggagggaaaatgtgcgcctggctagagaaaaggaagatatagaggagccaacccaaaagaagcggaaggtcaatcgggtggaagaggaggaggtacaggtcccagaaataaattcgcaaggccgacggactcgctcccaagtgtccataaatagctccgcacaagagcgaacggttccccgggtcgtgcctgagatcatcgaggacagtcaggacgatgaagaatatttgcctggtatgacacttttatcatataaaagcctgacccgtctaatcccctcgcagaaaatgggttggttgcttgcccaatatgctttcgcaaaatgaaggaagaggcagtgtttccacatctgaacatacaccaacaggaagaagaagcgcctaaggaaacccctacaaaggcaggatctttcgggtatgttaattctattgcatgtctagaacatggcgctaattggagaaaaattgcattacaggtcatcaaaaggcatatcccaaagaggccttaccctccccagcaagcagcccgaacggcttccggctataaactactccatattaaaggataactcattgcggaaaaagctccgggatctcgggatcccagactgggggcaaaaacagctgttgcagagacgtcataccgagtggatgaacttgtggaatgcaaactgcgactccaaacaccccaaatctaagcggatattgctccaggaactggacatttgggaacgcacacagggtgggcatgcgacggcgccgtcacgattcacaacctccaataatgtgatgcgcaaggacttcgataccaatgagtggtcaagcaaccacgacgatgactttaagcgtttgatagcaaatgcgcgtaaaaagagtgaggcccaagtacgatcgactatccctggcgcatctccgtcttcatctagacagaaggaatcacaaccccagcaggatactggattaccggtgaatggtgcacacgttgagttcagcgcagacaccgatcctaattttgtcattaacctatctgggtgatctcaaaagaagccacattgaactcgaattgagaagcacccagaagagtaaactattcattcacgtaaggcagatatctctccaacaatttggagaatctcagtttgcttgcatcgggcgatcctcgacggacatgttagagagcctgtcaataatgttatctgccagtgccgagtccgcatcttcggccgcacgtgctcggcgggaagcctcatcggaggcctgcttgacactgtccagttcggcaagtctgctctcgacgagtgcctctctctcgctcgtctccattgccgcaagctcatcatcaatctctccctcgtcaatgactggcccagcctcgttcatgacgcttccgacctcatccaccttggccatctcttcccgcaattcttcaacaatgtcctcaaccctctcggcaccaccgatctgagtatgtagactgcgaagcacaccagtgcttgacttcatgatccgcaccatctccacctggtctgcagcttgctcgatctttgaataaacctcatcaagctgtatgagagtggtagttctgtcctggaggttcttttcagccattttcctggaacgcacggcggacagcgctgatatgcggttcttgttcgccaaggccgtcttcgcagacgcggtcagctcagcgatctttgctttcaggcttgtgacctgtttcaacatagtcaactgcaaggtcttgatggatgcaatagttgtgtcctgttgggtgatttccgccgattcatctgccgatttgaacttaattgtctagccatcaatcagtcaatatctgggtatcctggccatattatatagtccaacttaccttaccatcataggcaatagcactgctatcgcgggacaaataaagcaacaggacatcaaaatctgcgtctgataattccgtagcttcgttcagtatggccgcaaactcttcaacaaacatttccctagagtaaataaggtcaagcttggatgatttgccgcctgtggctttcttaaccgctaggtctgccgcttcctgtaggttctctatcaagaccaactcctgcacctgcagcttcggtgctgaatcgctatcggaacccacaacgaagcctttgagctgtcgagctccccagctcataacattccaaggactcagaaccccgggatcaattagcttccactgacttttcttttgcagaagcccagcagttgtcttgtaaattggtaatggaatcattgaattcttgcgcactgcctcatcctgtaaacctcattagttagcttaacagctctgtcatccaaggggaagataatagacctacaaatacagtacccagagctgcgggtctcccccactccggactctctaaatctcggagcagcgattcatccgttcgcagaattagatggtctgtcttctttcgtttcaagggtgctccgctctcagctgatatggtcgagccggaacgtacccgcacaccgcgtgacgaggtataaccgcgctttgcggctcggttgagtgcatgttcccatgcggcgacgttaacagcgtagccgtcggggtttgttttcttctgaggtgtgaaatcagagtatagggagggtaaacggttcctaaggacataacatcgaggtaagcatggtatcctctcttctgtttaggactcggtttttaccttcggaatgcttcctcatgagtgaggatatatttcagtagttcgctcatcatgcaagggtatgttgaggaggaatgatatgacccgctgtaagcagataataataggccaagttgtctcggagacaaagcagatagcgcaacagctttatcgataagccccacgtgacgcgtccgaatgtgatgcttagcagttctacgacaatcaaaggatgcctaaatttatgtttggacaagcttgtattctatggctatatgctatggtgaggtattaaggctgtaatgagtctaagctcgttcaaagtcatcattgggtgttccctcagagtccagaggcccctgcgtcgtgttaaaggctccggtatctagctgcacaggatgcccgactagagaccggcgatgatggcgcatgtcgagcttctcgctggtctcttcggtgtccaatggatcctcactagccggtgcatctcgggcatcgaatcccctcgattcaagatattcaaccttgacagcatggcgcagattgtcaacgaagctctgcatctcaggcatatggaacaccccgtcagcctgcaagacgtcagcatagagaagctcagcttcttccagacaggccgaggctagggttggatgtccagatttgagccattgatcagcagcaaggatgctccacatgccggctttccggcgacgtccaccccatttcgctgcaccaactggtgtcttggaagcatagcaagctgctaccctttcagtgtatagaatatgacccactgagcccacaagaccaaaatccatgacccgcatggcccatttggctgcgctctcggtagctgacccgccacgagacttgaggagttcaaccgctagggataaacaacgcagtgcgtgtggcgcatctgaacaacgtgtgagataggagtaacaagcagtctcgaacatttggtcgacgctctcaagcttgattttggctgatgtggccaatggatttaaaagcatgctaacagcgcacatttcgtgcgcaccagcgtgatacttccaggctttgtcgttaccataatccgatcgaatcatatcgtatgtagacgcagctaacttccaatcgcggagcatgaacgcgaagtccgccatctttcgcaagagagcctccggggagtctggactataagaatgttgtgctggatcgtagttcccgccgttgcccccagacgagcctccgatacttgaacgtgagcttgaaccgaagccagcccaccgccgagacatcgacataaatctgccacttataccacgcctccgagatgcaacctggtcgttccagacagctactttattttccatgaagggaatgacggactgcaccacgagttctcggatgaatgccctaatcgcagtagcatcggagccaaaaagatatggcgtgccatcagtgccgagatcaaccaaggcttctagcaggaagttagtttacgtctgtttgtgtagtagcgaacacttgcctgcttcacctgcccccgacagatactccgacggcgagagccattcgcaccggggaacttgcatgctatcatcgtctgtcaccacacactggctgctccgaagtcttaaaagatggcaatgtagcccaaagtgccgcttcatctgatcataaagcttgatagattctgtgatatcgtctcgttcttcgtcatgaactaaaacgtaataacgaagatactcctggttgatccagtcgggtagctgtttgtctccagtggtaccatcagcatagagctgcctgagtgactccaaaggagctgggttgcgcgagctgatggctattacattggctactgggtggccaaatgtctcgtggggagctgtaggtgccgaacacagcagttgctgcaaaaacgacttgcataatggggttgttgcagggaatcccagaacatcctttgtccgtaccgacgcaccaagcatgtcatctgaagagtctaactgcttggtcaacaactcttcaatctgcgccaggggcccagagtctcgactagccgcggccctaccgatcgctctgaaatcaacaaaggacactccaaaatcctcccatgcacgactcgagcctatactatcccggatcaccacctttccggaaactgtttctccaaagggccgcaccaactcccaaaatccccctttgaatcccttgctcctcaccaaattatcggtatcctccgaagcatggactgcgatcgtcggtgagaatgaccggataattaatgatcttatatcttctgaaccatcggactttccatcgaaagcagaaccgattgatgaccttgctaactgtggggtggaagatcttcgagagcgcgagtgcgacgagccagatcgtattggtaagtcggcgatcgtgtttgaaagagctgtcggcgaggagacggtttgggattctgatagttccgcatctaaagattgatttgtttcatgttccccatggtatcgtgatggtgatgtggatgcgactcgcgcaacgccaggggagaaggacggcggaggtttaaccggagcagcatctccgggcgatgtcatgggcggacacctgctgctttttgcagatttaaagcgagtgcagttgatcgacaggccccatcgactggtagatgagattggaggagttgtaatagagcgagtaggtgactgcctctatgtatgtatcacatgatctgtaactagagataggcagagtcagcgctccggtcaccactgagggaaggggattttcaccgctctgccggttgaccgccctcaaaggcaggagattaatttatcattggggagtttatcttttagaaatacaagcacaaccacgctctcgtggattttcttgtcagaaagaagtaattcttcataatcaatttcttttctgggagagaattaggattttctagcaagacggtggatacctacaatttgttaacaattaagtcacttttatcacatcaactactttatcgtcaagaactgctcccaaaactgctctatataagtaagcggacggattttcgtcaccgcctcgtcggttgaccggttttgtcattccttccatcagtcaacatcatcagtctttctctgtaggaaaagggatactcatacagctgcattattccatcacgttcatcaaaaatctacaggaggagtcttccccacgagtggcgtgaggcagattgcggtctgacaacaaccacctctagttgactgacaaaatccactggcaacatggagaaggtagataactaccagccaatcagtcggaacgataacactgtccgtattctacgagccttcgacaatcaccttccggcagatggcagagccaatttcatccgccatctccagtccctacaaacaaaccaagacatccatgatcatgccgagtccttggtaaacggcctgcttgcgccaatgaagacgcttcgctcgacacccacaatttccccacgtgctggaatggaagactcgatcgagaatattgcttcgcagtcgagtggaccgttagtaagagaaactcgacttaaggcagagtgcctgaagcgtgacggcaacagatgtgttgtcactaagcgtgtcgatttccattttctctcaaaaagtgacaccactactccgggagccatcacagaatgcgcccatattattcctttctcattggcaacatggcgagatgagcgcgaatcacacgctaaaaacatcatatggacaaaccttatccgacatttcccagcactcgaaacgagaatcagcttttcccgggataatatcaatgataccatgaatgctatgacaatgacccgtgatcttcatttctactttggccatttttattttgcgtttgaggagactcaagtgcccaacaaatacagactacaagtataccggccaaatgcattttctccccctctccctcggacagtcaaatttgtgtctcgtgacccacggtatgctcttccaagtcccgaactcctcaaggttcatgcagctgtcgcccgtattttccatgcatctggagcagcggaccatatcgacaaaggattccgagatctaggagagactagtgttttagcaaaagacggcagtaccgatgtttcagctatgttggctgttacctcacttggtgttctcggctcacgcactgggaatatccagcagactccagcgaccttctcgggtcccaaagctcaaagtgtttcaaaggttcacagtgggttgattgaagaagagggtactgatgaggaatacaccgtgtggtactgaatgtttcttgaggtcactttgaaggcaagaattgtcggccgcttatgcggccttnnnnnnnnnnnnnnnnnnnnnnnnnnnnnnnnnnnnnnnnnnnnnnnnnnnnnnnnnnnnnnnnnnnnnnnnnnnnnnnnnnnnnnnnnnnnnnnnnnnnnnnnnnnnnnnnnnnnnnnnnntatgcggccttgccaggtattttcttgatagtatttcttagcgtctaggcatacatatctatatcctacaacaacaaaattcgatatggtgtactagcggttcaagactgcgttggaagtccgcttcaaggtgttgttggggagaaagccaagtcgacggattcgggccgacaagcaccaagcaatggaatagagcgacagcagccgtgaacaagctaagcactaaatcattctaaaaaggctaaggatcgtcttgtcgattgtaaatgtaatacagagtactctcggtagaagctgatagtcgatctccaagtggtgatgcaaaccacgtgagggccatgcttatcgacaatcaaaccgagttagtttctcggagcatcaacctggctctgtccaatgcagttgcactcttttgtgtgtgtgtttaaagcttctggtatttcttcagttaaagctccatttgcccgcactctagcgagaagagctggtcaaatacgcccgtttcaacaacatctacccctccgaacctactctgcatctgtaccccgtcgcatttccatgcgcaaccccgaatcggacccggacttctcagaacgagtcagcaagagacgacgcatttcttccccgacgcgggaaggctcatacgcaaccatgagctccgccatgcctaccatcgagctcactccacttgaaagcaccttacgaaccctactcctcgatgtcgcacaatacatcaccgagcagaaaattgccaatggaggcagcactgcgaaagatcactccgagactgtcttgcgcttcacgggcgggtgggtcagggacaagctgcttggagtcgagagccatgatatcgacgtgggtattagcaacatgacaggataccagtttggtatggccctgaaagactacctggatgttccggagaatcttgaaatatacaagaaaggcctaccgaatggggaaatgcacgacgccattgtgagccttcacaaaatcgaggccaacccagagaagtcgaagcacctcgaaaccgtcacaaccaagatcttcggcctggatattgatttggtcaatctacggaaggaaacatacacagatgacagtcgaaatcctcagatggagtttggcaccgctgtcgaagacgctttgagacgcgatgcaactatcaatgcgcttttctacaatctaaatgagtcacggctagaggatctcaccgagagaggactgaacgacatgaagaaaaagattatccgatgcccaatggaaccatatcaaaccttcaaagatgacccactgcgtgtgcttcggttgatccgctttgcgagcagactgggataccaaatcgagcccgaaaccgaagccgctatgcagattgaagacatccgcgaggcattgaaactcaaaatcagtaaagagcgagtgggaaccgagctagaaaagatgttgcgtggtgagtcattgcacgtgtccggtattctatatctctaacaagtcgtatctcatatcttaggtcccgaccctcgcggtgcattgcagttcatcgatcgactccatctattcaccactatcttcgctaatcatcaggacgaagttaaggctgatacatcgacatggccttttgcatacaatactttggcgcgattgctgcatccagaggctggtgacagcgatgaacttcaggcagttaccaagcgcattcgtgagatcttattccgcgacaaaactaccatatactacgcctggatgattgccacatttgctccctggacttcaattcctggccgcaccgggaaaggatccaagcccttgcccccgcgagcggttgaggttggaagagatggccttcgcagtgacaacaagacgctcaatgcgctccgcgctgctgctctgcattacaaggaaacaattgcgacaaaatccgcacttctcgcgaacaagatgagtggaaccccggcagaaatccgacagtgcattggattgcaaatgcggtcgtggaataaggactggaagctttgcattctcctggctattctgcaagaaaatatggcgctccgtgactttgcagaaggtaagatccgttcccttgatgataacattccaattcttacaatgtgcagtggcccgtgaatacgaccagttccttgcgtacattgtagaaaacgatctggagggtgtttgtgacctgaagcccattgtaaatggtgacgaaattatgaaaagtctagggactaaaaagggaccttggatgtccaaggcagtcagcatggcccttgaatggcaacttcttcatcctgatattatcgacaaggaaacggtgctggaggagatcgcgggtcgacgagcagaattcgaatgacgtccgtagatcccgatgacaaataaaatcccattccacggcggggacaactcaaactacttgaacttcaattgtttacaactcttctctttcattgtaaatatcccagaaatggataaactgcgcaaagaagcccgtgaggctctcgtgctgaaccctggcaaaatgccagtcggtttcttccccgccgttgcggctgcgtccaaaagtgatttgggtcaattatggcaagacattgctgcttacgatcactcgacgcatttgaatgtacgtttttgtggatttgatgaagaaaaatgaactgattctccagatctgcgagagccttgttacggcgaccagctatatcgactactgggatgggatgctgccaaatgaccaaggcccgcgaaccttgaaaccagctgaagccaaagccgtgaacaacctattcgactgggccagtgctgctgctctaccttcgtcggattttgctgtcgattttgacgagactgccgagatctcagacggtaagttcccttataaacataaacatgtggaacttttactaattgtgccacacagatattatcaaggctcagaatgagagtcgttttagatctgagctcgctctggagctgattttagttttaaacaagcccatggcaggattgccaaatggcaagccagacaatgcggcggacattctcctcgcgggggcatgttttgtcaaccagcaaaacccatgggtcacatcagagagctacaatgcgacgtcgatgctcatgaacgtgtgggtccaagacactcatcttgccaatacattctggcccgctatagacttcatccttaaggagaggattaggcctctttttgcaaagacaaaaaaccccgccatcaccagtgccgggcgcaagaacttccatcctcaaactctacctcgcttcggtgcaagcgatctggacgcatccgcaaagccatggaaaaccaccgatgtctacgtcgcatctgtattgtcatggatcctctcacagtaccgacccgaggacaaggcacagttcgaaacgcacttccagcttttcgtacccactatcctagcaatgattgacgacaacaatatcccattcaaaacaaaaggctgtgccctactcattcagctgctgcaaccaatccaagaaagcggctcggatattctccgacgaacaaacctcacctctgtcttcgaagacgccgtcacgccgtgccttctatctctgccatccatcacacccgaagatagatccttagagctactaggagaagcatacccagccctcctctccaccctcaaaaccgcctataaaggccccacccaatccgaacaggataaagaagcctacactaccagcctcgccaaaatcctccgatcaaacctcatctcctccttccaccatgtcagctccggcactccagcctccttcccacatccccgtctctcaaccttcctcctacaaaagataacgatcgtcatcaacgagctgggaatccacactacaaagtacctccaagaaatcatcccagtcctccacacaacactttcaaacccattcggaacagcacatcctccgctgctgctagctgctgctgcagctacacaggcggtgatcaagaacgcacacccacgtatctggcgttggcgcggtgagatcctaagcgggctaagttcgtgctggctccatattgccgaggatagcagggattccgtgcctgagctggctaagctgaagcgggagttgcggcagacgcttcaagttttgaaggttgttttgctgaatcctgttgccattgcaggtgatgccccagagccggaacagctgcaggtgaaggaaaatgtggagaaggagttccaggaacttgttgatgcagatgcagagcttaagggtctatttgcttgagatttactagcaaattctgtctgaagggttatttttaaacaacaattatgacaatctcaattgaagatatctgttaggttgaagtccggacttgctcttgagatatgggtagtagtcaataaccacgatccatagaagcttcaataaagtaaaataatatgtaacgagggtatcaatttgcaggatactgtacgccaaaacaaaaagaaaaacagatactcaacttcgcatcatggatcaacccgctgcttgaaaagactcttcccgcgcaaccactggcggtatcgtttatatctcttcttttcgtagtcctcacccacgacagtaataccgtcctcggaaacatccaagaactcagcataagccagcatatttaccccagccctcgcctccagcgcagattcctcgacattgcacttgttcgcgtactccaggagatcgaggttgtagccgtggtcttgcagcgatgaggctgtcatttcatctgcggatgtgacgacaagcgggaccttgagcgggtgattaatgtaacgctcatattcttctgcctcggcactggtaacagagggactgagcgagtcgctgactagctggccgagggtccactgagcgatctccgctttgctgggggtggcgtgggcgtttggggggtcaatgggtgggatgcgggatacatgagggattttgaaagcgggctctttgatgatgcccgtgagagggggctgtttctcggatgagggtaattggtgggcccacatatgtgtggaatcaggtattggcaccgtgcttgatgaggcgctactgcggggggtggatggctcttggatcttgacgctgcgctgtggtaggcgctcgcgttggatttgctctggggggatgcggggcacgaagggactgagatcgggaactgggtgccctgggcggactgggggtaggtagcgggacgtggagttcattttgcaggagaagactttggagagggaagacatagcgagtggtcggtagtattccatccagaagtcatcgaaatgtgagagtggcgctttaggatggaatgggaggggtggaaattttctggcctctaaattttctggtgtgtaccaggagatatagctgggtttctttctgtcaaagtaggctttaggatcggtatggtggagatagtagtccgtaggaagatcccaaagcatcggaataccttgcgcgaatgtgtagtttccaagaaagaggttatatgcctcttggcgctgagcatcaaggaaagagttgttgtaataccgcttgaagctttctaccatatcacgagaatggctgctccattgattaatcttgcggtaggtagccatggtgttcaccaaatgcgatccgccgtactggatagcgatagtgtctccatggtcatgccacatgttcgtgaagagattgacagcatcagtatcatattctacagttgtgtcatctatgacaccaagcgcatggagctgatagccaagtgccctcttgccaatgacaaactgcgcagcatttgttcggtcgaggcaatcaatgcagttggtccttgcgacaccgttctgaagctgcaagccggattctgcatcatccccattcttgaaaaagccaattttgggaatgatgtcgcccgcaatagcttctaacgtcttaatgacatcctgatcacggctttttgcagcacggctcatatcccacgcctcgtaaatgagcttcttgtcctcaggaagaaactggttcaagtaagtcaccgcgttagtgaactctttgaggagtatggactctcttggagttcgttcgcgggacttaaccaggttcagaacatagattggagcaccatatcttcgaaatagatcgtcgaaatgcaatgccgcagccgagtaaaatggatccacgagattaagctcaatatccggtttcggtgatacgcccgtgttttcttgagtccagtgaagaggaatgctcccacgatgttgaacatatgaagtatagtgagggtttgcataaagttttgggccagcagaatggaacgacgttgttgtctgttcacatacaatctgctcggtctccacatcgttggccacgtatcccaggtcgtttgcgcctcgtttgagaaagcgcgctccagcaaagaatcgggatcgacgtgcgataattgtaatgtagaccactcgtccatagacactcatctttgactgatccacatatccatgaatgataggtagacaccactcatagggattcttgagtacctcagcagccggggaaagaagatgatggttccaaataaacatggaatggtaatcatgcgaagatggttgtggatggccatcctggtgggcttcgcgatcccggcagatattatgctggagtgtgcgagtgatgtcgtaggaatagctgaaatagaaagaccgcgacaagtctaaattattcaaaatcgcaatatatcgtgcctcctccgaatgtttctcagccttaaggtgtgaaggttccgaggtggtcaatgggatcagttcggtttcgtcgatctgatagacattgtggccacccagcatggcaacctgggtcctcttggtaacgagtagcatatagtatgcacccgtgaatcggatgaatccaagcaatgcccatgcactgcacttctggttaaatccgccagagctcctgttgccgtcgtcgatcgcatccagcaactgaaccatctcccttttgttgtacaccatgtcatcttcggtaatacttaactcgccagaatccgaggtccgatcaatcttcagaatccgaaaacgagtttccgcaagattgaacccgaccatatagaatcgagtcgcggtttcgtacagcgtaaatttgtgcaagcggttgatcccttcatcctctaagttgtccgaagccgtccggtgtttctgcgcaaaagtcgttgaagcctgtcgctcaaaggaagttgctacctgtggctcctcgtcttccacatccccttcctcttcctcctcaatccgagctccgggaggtggattgtacggtaatgggaattctgacccgactgaggcgtcatcaattattccagtatcatcggtgcgctctatttgcgacgagggtttgatgctcgtcgtttgggtcgaggttggtccccctgtggtatcttgtttcgccaaattcgggtcggatggaatctcatcgtggaaaggtgcttcctgggacactagtccgatgagagaaacatcatcaaagctctccatagctcaagggctcgaatggactcaaaattgtgctggaaaagctgcatacatatctaaatgatttctagtcaaaggcgatgttcggaagttcaaagaggaggtccccacacatgacgtcgtagtaaatagcggccaattggtcacaaaggcattctagggctgtatttctattttggtacttattccagacgtttggtttctttctaggtgtctttactagatatgctcttattagtagacaaatgtgaatgttcgctgggcactgattaggtatgccataccaaagtagcatatgaagagccgttaccgatagtacctgaaaaggagtaggatttcttttgttgcatcatatatacaattcgagcaacgatataccctcttttaaattccaatccaacgcagtctggtgtacaaaatgcgatttacaattaatgtatcgagaactgggactacgcgatccctcaaaccaacactctcctcaatccatcagtacctccaagcactctcctccctgttacaggacacctccccttgccactctcccatttaccagatcgttttcgggggccttcttcagagtcatctccactagggctcttctttgtctcttcatcgtcacctgtgatctcctcttcccacggtgcgccagcgccctcgccggtcatgaaatccagttggcgctgatgctcaccgttcagccagtggaagatgcacacataacagaacacgtaccccgtctggcaagcagtcgggttgacgagcggacccatgcagacagggcaagtatttgcgctggaaggatcagccggaggcaaagacacagtgtagatgggaagataagaggtcgctgaaataggcggttggtggcgacgaggaggcttgagtgctggtttaagatcgccggcagcgctcttcttctcctgctcggcctgcttcttcgccttctctttctcatcttggattgacgatttccgtcgttccgcaggagaagtcaaacctgccacaatgggggcaggcagatccaggacctcagttgccttgcgggctagctggcgagagaagtcgcttgcatgccaccattctaggaacttgagggcgaagatcgacgcaggaaggaagtagcgcagcgaggtcaagagctgagtatggaggttctggggactaagtagaccaagcagacctccgccgggtcgctgagatcgcccggtgctggggccaggcttgggatctagcactgcggcgatagcgcggtggtctgcgatgccgaggcggcggatacgcgtgccgataagccataggaatggggaggagtattttgtgttgtcgaaaaggtaggctaggttgaactccagaacagagaaatagtacgccgcattcacggatgggtagacattgcgcaggaaccacttgtagtagaagaagatgcgttggcgtagcgacgggttgaccggcagatcgtcgctgggattatatcgtgggccgctgctggtgaccagggatgcatgtggcgcggcatgaatgtcgtatccttcgtctaacttgcgctttaggtaaggtattccaaccatgacgaacaagttcttccagatgtccgtcgagtgtagcttcagggcctcgcgcacggggcctgcggcgccaacctgggcgcgcgggatctcgccattcttggttcggagaacgcgctcacgtttcaaggaatagaagttttctgtgaaggagccgccgaatgttcgcaggtagtaacgttcgactattaatgaaaggagggcatagatttcgtcatatgagttgaggatccggaggagatagcgcgggtggcggtgtgttgcgactgcgagaagataacgcaaagacgggggaagaagatccgagagctgttgctcagcgaggagttctgttgtcgagcacgaacctagcgttagcgcttctaatcaatacgcggggaagcatcaatcgacttaccgaagagcgacggcttgtgctcgtcgaactcctgttgaagactaggaaggtactccatcgtcaagagtgccagtcatccttatcacggtggtatttgagggtgtttgaagagagaaagaggaagagtcgccggaaccaatgatcatatgccgaggctcaacttatccgagctgactacgtcgctccgggcgggctgaagatccatacattcagaggtatttacaacaacttcaatatgtaacatgagatacgcatggaatattgtacactggagaacatatgctagattattttacaaagttgtttcctcgtcgttcaattttcccgagcaagtgcctcctggcactcagtccagggcggcatgtagaagctcagagacgcttcaccatctcgattctggagtgtcgggtctgctaccagaatacaatgcatgatggctgtcacgatcggaccttgtagcacaatagcaggggactcttgattcatcaatgctacccctgtcgacagacactcgcgcgctcgcacttcctcgcccaactcagcgtgcaacttgaacagctgcacgtagtcctcttgtgtgcgattagcacctttcaagggaaactggcgccacagacgccaaaatccgttgtaatccccgcattgaaataatgtcaccataagctgacgcgcatctactgcgtcaaatggaatgttggccgccgcgagtatcttggacagtcgagacaagatctgtttctgagacttcgtctgttgaacaacagacgaacttggagaactctcttctgggcgcaatttgttcgggctcgaaggtgctagattaggtgcacagacagcttgatagagtatattgaaaattttcatgttcaaaatcggcacaccacggagggccaagcgatccagaactaacaaagcaagctccatgtcaccctctgaagaatgagtcttagactgctcggtgataacacccgctgttctcggtgttagaagggcagaaacaacatcgaatccaagctcatccggaatttcatacccgtcgcgaagaaaatcagagaatgtgctaaaaagtgcatccttggtgtaagctgggtgttgccgagacacagcaatggagaacaatttcaatcgaaaggtggctttttcctgtggagagaaccgcgcggcgtggttggtatagaagagccgtagaaaaagagtggactggcgatcatttgggccgcttccaagctcatttcgtgcactatcggctggaagttcagcgagaatctgaagcaaagatgctggtgtcaattgagatgcaactgctgctgcgccggctggaacggtggaaggcgaagttcccatggccgggaaaccagcttctaacccagactcggtggagttcatggcagatagtgcgagtctacgcatggtatgaaagcctctcctttggccaggaatggaaccaaatccatcggacatagacctggggggtgcagaaccattcttggatgaatcctctgtgctgtcccggatgttcttgcgtccttcgcgggctaaagtagtctcccagaggccgtcaaggtcaacatcagcccgcttctcctcggtgaagatctggacaaccacactagtaccaaggtcaagattaccaaatccctcaattccaacatcactcaactgagtcgtagtatcgcctttgtccaccatacccgcatttacacagatccatcctgtggtgattccatcatccttttcgtcgatcatagtgcctgctgcactggcagcgcgcgctcgcttggctttacggcggagtttaattttcaactcgttgcgtccaagtaagccgtcggcgtagggagacaatttgtattggcttctcagccagcgacagagacgatccgcggacacgttcaaatgcttcacactgcgagcagttccaatgatcatgatgacattggcaccgagagctgcagggatttcgaggccacgcaggtcaaaaagcttgaggccatccaagcccaagtccttatacgtatattccaatagagtcgagagcatctccggtgaaccttctggaattttagggagatgagcttcggccaacgggcgctctttaatgattggcgccccttcctgcagataccaggggacatgctgtgatgaagctggcgcatttgcttccgagtgtggtgatggctcatctgtttcggatagaagagtatcaagctgattcgaagttggagggcgatcagatcgcagcaaagttacagcggagaaggctctagggttggagatcgaacgggaggaaagaggagaggatcgtggcattgggatgccggagacggaaacaaaggaccgcagcacttcatgccgacaagtctggcatgcagcccctcgtaaaagagctctgctcatagtgatggttatattggaagaaagaaatgcggagcttgagttcttccaacaggtccagttcttgatttgctcccagtgatatcagataacgggagcaaacactgcaaacagctgagtcatcaagaaaaaaaagattcgggtggggggcaattatcacaaatcgacgaggctgtgaatcttcaataccctggtgatttttcattcttgggttctgatttccgactatactcatcaagatgtcgatggatctggatgcccccgtctattttgcgcagcaggagaaagtcgcagcgacgtgagttcttatcgcaactttgtttctacctattactccccaccttctcaaatactgatacttcatttccctcagaattctctgttgcaactgtggcgctgccattgatggaacactctcagctggagccctatgttcggattgcattcgtcttactgtcgatgttgccggaggtgtatgtattaccccgtttgtgggctcaaaatcaaaagaagccttcttacactataatgtattccaactaacatggactttaggtgcaacgcgaagcggtgattcactgctgcagagattgcgaacggtggctgcagccacccaacagctgggtcgtcgcagctctcgagtcgaaggaactactcgccatttgtctacgcaagctccgtggtctgaacaaagtccgaatcatcgatgccagtttcatttggacagagcctcattcgaaaagattgaagctgaagatcaccatacaaagtaggtatccaccaattcagccaactgagcacatctagcccgcgggatcgaagctaacaacctacaagcggaggccttccaaggcactatcatacagcaacaattcgaggttgaatatgttgttgccaatcagcagtgctcagggtatgtccagttataaaccccccataacggttaatatactgacaccacctttttttagctgccagcaaagttacacgcacaacacttggggcgcaagtgtgcagatacgacagaaggttcctcacaagcggacctttttgtatctggaacagttgatcctcaagcacaacgcccataaggatactatcaacatcaaggaagtgaacgagggacttgatttttacttctcaaagaggaatgaggccgagcgcatgctttccttcttagagtctgtggtgccttgcaaaaccacacgatcgcacgaactcgtctccatggatattcatacgagtaagagtgtctacaagcactcgtggtcgtaagttttcccagatccaactcctcgcgcacacctatctaacaaccgcatttaaaacagcgtaactattgttcctatttgcaaggatgacctggttgctctaccgattaagctggcccgctcattgtctgatataagcccgcttgctatctgccaccgagtcggcacttctattaaccttatggacccttgcactctccggacaaccgatcttcctactagcacttactggcgccagccattcccgaatcttgcagataccaccgagcttaaggaattcatcgttttggacattgaatccaccggtcattctaatggtcgttaccttctgtccgaggccaccgttgctcgtgcctcggatcttggatctaatgatatcacctatttcacacggactcacctcggtggtatcttacacgtgggtgattccgtcctcggctaccacttgacgggaacccagttcaacaacgatcaattcgaagcaattgagaatagccaccagtacagctcaacaatcccagatgtggttcttatcaagaagcactacgtccgcagcaagaaatccaaggctcgcacctggcgcttgaagcgcatggctcgcgagcacgaggaggaggcgactgccgctgtagtcaatgttcctacaaacaagcgccaagagcaggagcaggctaggatggaaaaagattacgaaatgttcttgcgtgacgtcgaggaggatcaggagttgcgtcaaactcttgatctgtacaagaaccgccagtaccaggtcagggcagaccaaatggatgaggacggcgatgatgacatggatgaggagggacacgctgtgccgaaaatcaacatggatgagctgcttgatgactttgatgatttgaacatggaggacaattagtagcaatctggattttatcatggatgatcatgggactggttggcgttcgtgttttagggttttttcaatcatcaagaaaagttgttttttttttcgaattgatgcatacaatgtacagcatttacttctggaacagatcaattcagatgaaaatggatcaaggaaagagagacgagagtatgtagattttatattgtaggaggcagtttctaagattgtaaggctacactttacaatagtactacggaatggcaatattcgatcataacatctcagtgaatgatatagaaatccgggctgtagtagatcaaatagacaggccagaggccataaaagccaataaaaacaagacgaaatgttccccgtgaaatcctacttagaagatcttcccaagtacccgcttcgcgtcctcggccatagcaccatccttcgatccctttacaacctcattctgctggaaatggaaccgccttctcgtgggctgcttgtccttcttaggctgcagttccttatccccatcgccagccgcctcaccagccgcctccaagcgcctcttcatcttctcctcattctttttcgccatgccatcagcaatgcgaccactctcaacacccgcaatgaacattttagcttccttggattcgcgagcgtcggcaatcttcctcttgctttccctttcagatctctctcgttgtacagattgcataagatcttcccaggagtaccgtgagagatatttgatgttccacacatcatcgtgataccctatagatcgcagcactggtcagtattcatcacttatataagggcgaaaatgccagtaaactcacagctcgacttcaaaccacccacgatagtcgcattcaaggtctccgcgcagatcttggccgtctttttggagtcgaactcgatccacccttcagtgtagagctttctcttatttgagcggtttcgatggccggctgcagatgggagaagaggggctaggaagatctttgtgatacctccgaaccctctcttctctagcattgctttcaaggcgaagggtttcaggtacggcgggagagaagagaagtatatgacacctgagcgctttttcttaggttctttgccgttcgcgagtttcgacagcttggcgagcttgccctttgctttgagcgacttggctgatttggtgttaggttgtgctgggtcttttagacttgtgccaccgtcttcgttgtggttatcttcgtcttctttctcggcatctttgtcgttttcctcctcttcctcgtcttcgtcagactcttgcgtgaaatcttgcgtggttgtcgtccgccgccgcttcacggcccgtcctttgctctccaccacattggcttcagagtcgtagccgcggtcgctgccgctggcctcatcatcactggccgcaatatctagaaaatcattgtgtttgcgagtcgtcattttgtggaatccgactagggttgacagacttggttatgggtggcggaagtctgcaactttttttatgcgggtggtctgtgccctcggagtcaagccccggggccgttccaaggctaaatctactaatcagccacacatgagccacatggcaaagtcaaagagtccagcttaagaagggtttaagatgaaagaaattcttgaaattttgtaccggtatctcgaagaagccattcgggctctgtatgctgaaaagaaccctcccaatgtatccacgaaacgccacagagaaccagtataagagcccgcatgatatatgcaaacaaagggcaaaaaattgaatatgtaacaagtctaactaatgcccaacgatcccttggctcgctcataaacgtagaagctcactgcaaccatgggaatgaccttggcgtatccgatagtcagtccaacccagaagcctctgaaccctctctcgagccagattgcgcgggcggtttcagctattccaagtcgtcggccatcgccaactgcaccactgacttgcatccgccgacggaggacctccaatgggtatgatgaagtctgcgaaactagaccagccacagcaccagacagaagctcgaacgtggtattgagctgcggtcgtttgggtcgatccgcggaatgtgctaactcttctggtcgtctgagggtgtagcgcgccacactggggagacggaacaagtcacccactgtgtcatgtgtgaggaaagacattccggcgtaggggagcatgccgaggatagtcggggagaagccgcggtagaaattggcaatgccggagcgcgggaaaactttcgaagcagcagctgaagcgctttcggcagcagcaacggaagaagactcggctgccgcagcagagtgggttggtgagggtctaacacgctcgtggtagatttgccgccatacgttcaccaagcctaagtgtttcgactgtctggtttcgtatgccattcgcacgcgcatcagttctaatgggtatgtgaaacatacagaggtgacaccggccaagctgccggagatcaatcgccggaacggggtctcgaattcgctggaaggaatgaagaccgcgcggatctgctcgtatgcaaggaactttatagcggcgtaggggaaaattcgaaggagggtcactgagtggcccttgtacaggccccgggtaccttcattgcgtttgatatctcgaatcgctgaggccaggccagtccagctgcccgtatatttggcgaattgggggttcgacgactggaataggatcttcacgcggtctaggggcgctaccacggtcttagcctgtaatgtccggcgcattaattagtataaagctcgtaatgacctgtcgcccaggaaacttaccgcacaccctgccagccctcccgcaattccactcctcatcacataatcaaagctacgcttttcaatcttgtttttgccgctttctggtatgtccatgtcggcggtactatttgacttaaatgatttcgtagcgccgccgacaggcggcgatgccgaatgtgcgacgctcatcggagcgaactgcggagtagagtctgggattttgggagggtcgtaggcatagtccaaatgaccagtcgacatggaataggaagaggaaaaggaaagatgaagttgtaaaagagcaaccgaggctggtaggagggggaagaatatccggggcgccctcgtgatcagtgtcggcgatagtgagatttctggggtaccggatgatcttctggacactgcaactgtacacgcaggtctaagagttggcggatagcactctaagcttgagcggagtttcgaggaatataatgacagtgtaatggcaaaagatgaaagaataatagcgttcggtgtatatttccactgacgtatttacgaggttcattgtcgttacgaacattctgacgtgccgataccagcggctccccgcgaataaccggcgggttacggtactaatacggcccgcaaaatcaacgagtcccgagatgccggtttgtcatcgtgttttgcatccactaggcccaattaggacatggaaccgatatctatcggggaagaatagttacttgttctatgttattgcattgcttctaagctatttgactttcttccccaaaaaaatgctagtgaaaagagttgaactccccatctccatgcagctcgaaatttatacgaaatacaagaatatcgtggtcgcgtgatattgtagaattaaccctctagaggcatcaacccttgcgctgagagcgtgttcgagtcaaaggcttagcctgcttagcctgtttggctaccttggtcactcgggcatcatccgaaacccgcttgcgcttggctggcctgccaggatcaacatgaagatgcccattctcggacaacgcggtcgtgtttctccagcgcaggcagcgaagcccactctcgctcacatccagataggtcttggtccgggtggtcacgcgcttggctgggatatcctccgattcggctctatcaggcatatcggctaggtacgccttgcgattcttcatgtacttgccgatgtactcttgctggacgagcagctccttaagcaacttggactcccggttgccgcgcgagtccagccactccacgagctgttcaattgcctcggggtcctcgtagtagccccattcacgagcattccacacatgtgttgccccttcttcgtgctttttgcgctctgcgggggtggtttggaaatgcttctggtactgcttccgctgttcgtcggtaacgtcgatgaagccggcgcgctccatttcatccgggccttgcacccacagacgaccattggcgtagcatgcctcggccgttgagctttccggcataccctcgtagggcatcgcattgcgctcaaaccaccagtagcgattgcagaagcgatccattccaaggcatcgcgtccgggggcagtcggtctcgcgaaggctgttctccacagtctcgatctgctcctggagcttctcgatattggccttctgctcgtcgatcttcttcaagactcgctggtattgtttggaccccttgggctgcttcgccaacatctcctttcgctccttttccaattcttgtttccgtttacgctcgagggcccgatcaattcctccgcgtaatgagcgtggtcgagggatatcctcgtcttctgtgtccccgaccatttcagaatccccttccagtcgagagtcatccaagccgtcaagttcgggcaccggcgtaggtgacttcccagccttttcaagctcgggctggacggccttgcgctcctggtgcagctgacggagctcgatgagactggaagatgatgttagcggttgagatggcaatggtcaaggattgacttaccctgctttgcgcgccttctgatactcaattttctccttgcgcaactctgtcatctgattgctgcactcttctagataatttcggatggccctggtctccaagctcaacatacaaatcatctgaagcgcctgagtacgcaaattgatgtcaagtgtttgatactgctcctgcgcggtgtcctgtgtaggctcgcgatcgagaggcgcgagatgcttaaggatggtgttgcagacttgctccaagcgaggacgaacagatagctggtgcaaaagtccaaccatcaccaactgccacccaccgttgcggaaatcgcgtttgcgaagacgatcaatccacccgtatgtctcaaacatatcgccggcgcgatgaatctgtgtcttctcgggttcatgttcgttaatctgtgctttgatgacgactgcctcttccttggccagacttcctctagtggtcatcctcctgggcttcggctgcagctcgggagactcttcctcggcttcttccttttcctcgtcctcttctgattcatcagattcatcggcagggaagtctgggagtgagatctgaacagcaccatcatcgtttgatgaattgacgagcttcttgagaacggcgcaatgcacttcaacgaaaagctcgcagtccacctcatctgatgagaaccgcatagcttgaataaaatcgtcaaaggtgaaagaatccagttcaaatacttcgcagtagacattgagtgtgtcccaagtctccaatagcagccccaccgtctctggatctagatcaccgggcagaaggttctctgtgccgtcatcttcagactcacctaccgtcataaacttcagggctggtcgatgtttcttttcggaattcggagcaaggtctagatcttcgataggatacttgattggtggcggggttggtgctcttggctcattcttaatcaccactggtgggagtccagccagcttcctatcgccaaccagtggtggtttggaagggcgcaacgggttggaaggcagaaggaatgatgggttaccattcagcgaccgctgatactcttggtactgtgcctccctcgattttgccatgtcctgtgcagacagtttcgatttcgggcccttgactgcgggttttagctcgggcagctgctgagaagaaaagaaaccaaagaagccatcttggtccgctttcttcatcgccttcttctctgccaccttcgcaccatactgcaggtgcttaggcacctcaatcgggatcttgtatgtctctgcgacggatggtttgaccaaccagggggcacctgtccacgactctctggtgacgttgtttttgatgaacccgcgcagcatcagtttagtgaaagcctttcggtcgcgtgtgatgtggtcctgatccagcagagcctcttcgttttgccgatctaggatcttgaccagatacctagcaaaagccggtgttttaatggttccatcggcatataactgctctgcaaagttggccttatctctgatggtaccatgaagccgactactatcctcaagcaaaatgagaacggcttcgcctgggtagaagtctgatttgaattcctaggtttgttagatcagtcgttaatatgtgacgggtattatctcacttcatagatttcatccactaagaagagtgccgttagcttgattcggactaagaaagatcagaatagcatacccaggctgtccaccctcgaaactatagagaactgaattctgcgcagaatgggttctctcagggcatcggggaaactgttgttgacttcacgtgattcctccgtctagtcgagggttagcatgtgtccatcactaggtatccatgtgataatatacctcactgcggagcgcctcaaaaaaggtcaagcccgaatggcctgtgatctcgcagatgaatcggcgttgtttgtagaagtccattcggtgaaggtaaggctcgtagctagtgaagacctcattggtctctgggataacccagacctggaagggagaaagagtcagcgagaagctctggagtatggataatagaatacacacctcagagctatcatcttcaatgacagtttgtgggaggtattgaaccggtttgcgtttgaataacacctgtccatgcaattgtgtaagcctctttgtctccgcggcatcgaccactttcctcttggcgcctccgcagccattccatcggataaggtaattgcataccatgatgctttaaattaaatgtgcacgcgccagtcggccaagagctaccgtaaacagaatcgagaatcgaacatgaacggggctaaaccaaacgcgatcttggttagcgagtgaagcttgtcggtcgagtgtgcgaaggtagaggccgtgtcggccacgcaatcggcggagttaacgggagttgcgatatagattgcagatactccagtcgctctgcaccgttgtgtagaaaatgggcagtggaggggttggtgggaatcgtcgtgatcaggcgtggtcgcagatcaagaacacgcgaacagtggaatagcgatgccttgggaattcatgcggacttaccggagtagaacgcgtcttgtactgaagttgcgaaccaagcgatttggatagggatgaactggtggaatctcaaaagggggagggaggctgtgaatatttcaaggtgtagggaaccagaaagaagaaaggtagacaaaaaggacggagcggtagatcattgcaggaccgcgaatcagcggtggacgctgattggtggagaggaggagcaagcgggagccaaagcccagcagaaaaaccgcacctgggctttcctcgggaccctcgactctccctcctcccctcgtcatctccgactgtcaattctctcttcctttcttccccaactctgcctgtatttaccctcattcgactcgtctggtccaggagatttcatctacaacctgctcgtttcaacattctcgaatctttctattctttaacccgattatcaattcccagtccctattctcggtcacctcaccgggctaagatcgggacaatcaattcgaactaacgggaccatgtcactaccagctttgtttgtatttttagcatgaaacaccaacctttcagttggattctctttggctttaaatgctgaagtcttatttgttcatacccctaggcatctacctaggtagtcgtatttcatgcttaaattagaactagatctatttaataactatatgtgactgaaatgcaaatagtggagctttacatacatactctatatcatgtactgtctgctaaatatacatcatctttatgactctaaggcaagcagctatggttggcatgtaggtttgatacacctccttcagccacggtgtcacaagcgcattgatcacccagatatctattgttggataagagatactctatatatttgcttattagagacaataagcctctctttttcatgtcatcataccgagacttgtgattgtttagttatcgcgcggctagtcgtgaatcacaaacatgcgatatgtgcccaggtatagtcgtccctcctatttataatttactactttaagaacgggttgcatatgagatctattaaaaagcagcctaaaataaccgattaattactagtagaagaagtgaaagtacatagacaaaaggtatgatcggaaaatgacttccaccacctgtggaaatatataggtctcgtaaatatgcattttcacactagacaatcaaccaagctagtatctaagccaaaaatgtacggaaatacctatgtgtctacacaaacatggctagcaaatccctagactagaagagagatcctcccccatgtttctatctgacctgcatttgactgcaggccaaccatggatgaacagagactaactagattgggcttagtgagaaaatagactccgtgatccgtgggtctgatccacgtggaagcaaacaatgcaaacattctactcctatatcgaatccgagtaaatcccgaagtcaccacaaataaccacaagcagtgtgtagttcatagttgccagctgaaatataaaagggtcttttgcagctaattattatcaatctaagaggtaaaataaaccaccatgaacccaacccagcttccgacgacgccgagggcacaataactgctcatgaacatcaatggcaggaactctagccggtcccatccgaatatcaattggtgccccagggagcagtagataatcagaggaatagagatggtcaagtagagcagcgaaagccggtcgaataggaaaattcggggccgctcggggacaggtgcgactcggtcgaagacgaaaaggaacagcaccaaccacaggaccgtataaatagtcttgagggggaagtcggatgctgtaaacagcagcgggaagagcgaaacatggcccgcaaccgccagaggtcggaaggcgctgaagtagcgacggtccttgagggcgatgagactgaatgggatgataatgaggagaatagctttctcatgcacatgccaaccaaagaggaatgatgcgtagccacagagggtgatcgcaccgacaaaggtatcccagcagcctgggttgaaccagaccttgacgagaggaacctatgcaattgtgagagaaggccaaagggacaggaccagggacacataccagttggaacaagaaggttaatatgaaggtatattcctttgtaatctgcggaaggacggcaaaagaggtgtctcccaccagtcctcgtgtgacactattcagagcagtagtgttcacgggcagccctagccgtggagcaactgtagattttcatataagctcatatgtcgtgtgcgccgaaagagatagaggctacttacgggaaatcaaggctcgatcagcgaaggagtacatcgcccagatattcggtgcccagtacgcgtgacacagtcctctcgaaaacggaaacagcctatccttgagctgcagcaattgtccccattgtgcaaatggcccaaaggcaattgcaaagacacccaccacaccaactccaagtttgaaaatattaccgaatcggggccggaaaaccgatttgagactaaggcaataggtgcgcagtagatagacgaagtaggcgagggcaaggtataggtatatgtgcttcatgcatagcagcacagcaaagaggataccgctgtagagaagagtcgattgcttgcgagccaggacgattgataggatcaggattccatacatgaaaccattgtattggaagtggatatgatcaatgatgaggagaccgggggatagtaggatagagagactggctacatgcgcagcctgcctgtttggcaaaggaaccgacttgacgaatctatcgaactgcagtcagaattatgttgcatcatcagaaaaaaaaaagccaaaaaaagggtcagggtcgacgactgccataccgactaagcgcatagacaagaaccaactccgtcaaaatcacggttgatctttgaaagtagacggtctgccaggaatcatagccaaggttcttcacgatcagcatcgcagggtctgcgtatacagcagcctgtgacatcagccactcgaaggctgcaaagaacggtgggtaatcaagtgtccattccgaggatttctaaacccgaagtcaacatcccatgcccagaatcatgcgcccgaccgaacatacctcgtagtaccactcttggatggggagagaatgagtgatggcaagccaattgcgatggacctcaaaatcggtcgatttgctgcaacacaaagaaaagcatgttagcaaagctcatatagtaacctcaatgttgtattcccagtccctttaagtcccccttgcagattctttatagtgattgtttgatatctttccacctctccttccgatcttttttgctccggcgaaacgagcgggacggactcactatgcggggaagagcagcaccttgaaagcagctgcaacgatggcgcattgcgccaatgaagggtataggtcagccattggagctcctgcgcatgatggtgcagcgatgttgaaagccgggaagacgcgagatgggagaatgcgcaaatcggtgaagtgagaagcttcctccgcacgttattttgaggccacgtgatcagatgcggagatcggaggtcaaattaggagcgaaacagctgggcagaaggacagataagtcaatacaacacatacaacgctcaaaggaaacactgtctccgtatggacttcacagacgtcggaatccgccacacgcttctcaacagtgtacagctccatcactttatcgatttctcaccgtcggccgctgttattgcaaaggaggcccgtctctgcgttattgccattgttgtcggttggatcaccacaagtgttgtctccaacctttgcaatcggaagtgtaactgtgactcaatccatagcaagcgctgatagctgctgcgcagagcttccacgaatccatatcaacttcaagcttcaccaaccacacaacatgatgagaacattagcttccctggcattgcttgccgtaggggccacagctcaaattattgaaagctcaagcttcggcactggccaaacgttagtataatgtccacgctcagtctttaggttatggttatctgaccttagaccaggatatcaccaaaccaagactccatccccggatgggcaattggaggagagggccatgaaccgcacgttgtgagtcagcctataacaactgttggagaattgctctaacagctatatagctatcagacaagctcatcttaacgccaccgtaccctggaaacacaaggggatcagcttgggcacagagtccgtaagtgaaaggcttcgaaccgtgatattggacaccagatactaacatgagtatagagtctctcagtcggaatggtcagcagagctccaattccgagcaagcggaccagaacgagcaggtggaatcctgcagttatggtataccaaggatggccagtcccgtattggtacctcgagcatctatactgtcggccaatttgacggatttgctttagtaatcgatacgcatggtggaagagtgcgtattaaccctgtcgcgtattgtcgtgccgtattgatcattcgttactaacctctcctatagggtggtagtgtccgtgggttcctgaacgacggtaccatcgattacaaaagccacaatagcccagacaccttagcctttggccactgcgactactcctaccgtaacttaggccgtccatcaattctcaaactcaagcacaccagctccatctttgaagtcaccgttgacgacaagctttgcttttcaactgacaaggtatgtatacatcatgtccccatgccgcagccattgtaaatatactaacctgagtaggtcgccctgcccgctgggaacactttcggcatcacagcagccacccccgaaaacccagactcatttgagatcttcaagttcatcctcgagtccgccgcaggccaaggctcgacaattccctccaaccaaggcagcaccccccagcagccaatccccgatcaaattcctaaccagcccgcccaacccatcatcaactccggtacagaagccaccatgaacggcttagctgcccagatcgccgacgtcagcggtcgcatccagcttgcgggcaaggccaccaacaccatcctccaggagctgaagaaccaggcccagaaggccgaccagcgccacgcagagattctccagaagtccctggctcaggaccgccagctcgcccagttcgactcccgactcacgcgggtcgagcagctgctccaggccctccagaccgacctccagagcaaggactacagtggacgcttcaaccagctccacgagacgctgcgctcctcccacctcagcttgagcgagaacctgcagggtcacctgcggagtggtaagttcacttgcttcgttcagacgatatattagttcactctgctaattgcttttctctcatctcatagtcattacggcctctagcccacgcatgggcttcttcatcttcttgctaatcgcgttccaggtgatcctcgcgatctcctacgtcatctacaagcgtcgccgggccaacatgcctaagaagttcctttaagcgcctcatcctgtctaaccccccacccaccctgtgccatctgaatctgtgtcgtcttgagttattgtgtgatggggagtggggggtgtattcatagtattcgcaagtgtgctctgcccggaggcaaccgggatttattcttacgggggaagttatgtagagtacgaatatcattacgttgatgaaaattctctcagagtaattacatttacaagtaagagaaaagtgagatggcaaatattcatttggcctttggcccatgctatcgtacactttctccgagctacccggccacgcaaattcttttttttcagaaaaaaaaaaagccaagcaagataaaaacaacattgaaagaaaaaaacagaaacgtggccaggcagctcggagaaacagattcgagaaaattgacgatcgccttttcggcgaccgggaaaatggaaaaaaaaaacaaatccatgacaattcaaaacgccgggtcctttgatgcgcgcattgaattaaattagagccgggaggctcgctcacttggacttggtgtattgacgcttttgcgcccgctctccggctgatccatggtcatcagcgcgagatcgcttgttccgattgaacacagggatccgggggagaagctcggagtccgaatggtgggactcggcatccgaagatgcgttgggagggtgagaggtgccgaggggaggagaggtgggagcatgagaagagcccagggtagactcctcgtcaatgcgagacagaggcttctgagcaacgggcgaggcaggccccgcagcttcggcgatgtgaccttcgccgacagcaggaggctggcttgtagccatgccgaggagagcagtggcagcgtcaaattcttcagtggaaacaggagcgccagcaatcatgttgttaacagcgtgagaaacattctgggtgaactccgcgggaagaccgttctgtgcgatgttgttggtgatcccagcgttttcagcacggttgaggtaatcgctggtgagttgcttggtcaactccaagcactttcgctcgacaattcgggcatactccttttcacgttcgtgatgatcttccttgacagcagtgatgaagttcaaaacgacatcgcctccgaggaaacgagctcttttatctctccagtcttcgtcaaacaaactctgatttgggtcgtcaggaagcatgatgtcacaatcaatgtacgccatgttcttggttcggcgaacacggcgcgtacgctcgttgctgccattaatctccttggtggcaatcatatcgtcaggagtgacatggttaggacacatccacccgaccttggggttagggggatgtgcgcggggaggatcaagacaatccagatggaagcggcaaggacagtagtcgcaagtaataatgggatgtataccttgggatgtaaaaccacacttggaacaacggatgcagtctcccttgttgtcgtattctcggagaagcatgggattcgcgtaaatggtagggccgtcttgcttcggtgctttagtcagccgcggcaggtggggcgcggccttgtagtagcgttgatgcttcaaattccgggcatagtcgccatcaaacacaattccttcatccactccatggaaatgctccttgatatcctgaggaggttggaactctgtcttcttgtagtgtttggagtgtgcaatcaaggtcgagaagctgttgcgaatggagcacttggggcaatgccactctccctgcggaggattcttgggatccaagggaggatccaagcattcgaagtggtatgagttgatgcatgtgtcgcagcagagcaaatcgccaccttttccacattggtggcagtcgtcgctgttctcggggggttcactgtaaggtgtcatattagcatagaactagccgagtcacaccaagaaatcacatacatagaattcggcatctggcgtgcttcgtggccgccagaccagtcattgaatcggaccgagtaagcagaattcgaaagtgaagaaagacttgagactgtggtatcaacagacagcgaccgtgcacgctgtgggacctcagggcccttggccttttccctctgacgtcgcgagacgggcttcccagtcttgcgagcgacagccgaagcaccatctgaatagacagagggagccgcgggctccggaccctttacgagaggtatatcgaggatggaacccggaacagggagagaacgcgaacgattgaacgcgtcgatgtccccatcgatacccgcatcaatgttttccatgtcgtagggatgctgaatggcatctggtggaccgatctgagttcgaattgcactgtactggacaacggcttccgagtaagactctgcttcgagacgagcacgcacagcccgcatcttttcctcgtgatcaggatccatttcccactggcgcttacgcttgtaagcattctcgttgacgcggcatggcttcttgggcctcttgagcggagcggtattcgatttgccgctcaggaagttttcctcaacccgaggaccacttgtgtcgcgataaatgtcagagaccttgaagctaggctctgcaccaacagaattggcagctggctggcttgattcgctgcaggaaggaatatcggctgcattggccgtagagcgaacgtatttctgataccacctttgggcttctatcagagaattgttgaggatcgtttggagagcaagttgcagctgtttgtctcctccgtcattttcggagaggttggcaatcaaagagagtttgaattcatcatccatggcattggaccagaagtaaagaaggccaacgacacaccactcgttgtcgttctcgattgagctgatgatggcgaacttcatgacgccccgtagtttgacaagatcatatttgtcggaggggcgcaaaggaagagacatcagcacggcgaggtacttgtgggtgatgtccgcgctcgggagggtaggagtggccgcatcggctggggtggtggtagagctgcgaatagactcatcggccacggtctcggccccagtcgaggttgaggcaagtgccgcttcttcggcgatttcaacatgacccttgtcagtcggcgggctctcaaccccgctaacgggggaaaggcgctcagcttcgtcgcgcgggacgttggtcggcacggtcgcgacgctgtgggcccgttcagacggaggagccacgccagcagctcggtactccacgggcgatgggtattccccgatcggtttcattgtccgatactgggtggtgggcttcgaagtgcccgggggcttcttctgaagcttccgtcgttgcgcgggtttggaagagccctgacggcgttcggactgagtggaccccgtaggggcaggcggaaggggcctggtagggttagtgccacgcgctccatgccctaacttcctggggtcaacgtactgggcagcagcagcatctttcttttccttcgatgccttgtcggcttcgcctatttgaataagttagtttttgctctcatctggaggtgagtaaaaaaaatgtggggtaatctctcagtttcacctgaaagatgcaacatctcgttctccctcatctcagaagtgatcagtgaccagctcatggagatagacagagcaagtgtcattcacatgaaagtgagaaaagggcaatgatgttttcggtcatataaatggctggacttatgaggagggagagtatgttgtctcatccactccagaaccaagtgacagagcaccccgtctcagaagtgactgggccaatgacaagacaatttatgactcgaggcaatggcatggaaaggccactcatctttggtcaagaaatgtgcaggtcgagaggcagatgaggtgttgtatctcagtcacaacgggagcagagacatggtgcatgagacagggtaatgggatagggaagcatgatacagaggagcatagcatgacacgaagtgatctttcagcttgtgggagaccgcgaaatccgcttttcagacgtgactggatttcaggggaggggactaggatagacggagaaatatcacttactcttcttgctgagaagacgctttgagacgcgtcgcatggtagcacgcacggtatccatttttaacgatgaaagtaacgaaatggattgaacgtggggaagaagagagaagaaaggaagaagaagatgggaggttggagggattaaatactctgcgagaattgggggccttccttttgagtcggggctattgagagtgcaaacaggaacaataggatagacagtccaggtgacatgtcatgtcacgtcttgacctcgataccctattcttccaggatgcctacagagaacaatagcttttatattgatctattgatccattgatctattgagtttgcctgtgtataaaactccaatggaagcattggctctctattgtccctaagctgtgtagacaatctgccaggcacccatgcaaatagacaggctctggattgaccacagaaggtgggtacatgtctcacgaggaaatgaacctaggatatgatatactcttcagatacgctaagccgtggtttggtctctagggattcagtagtttcagcagtcgacaggaatgaggcagagatcctgattatattgctgcaccaagactctacacagactgccaagttgtggcagaatggtcccctgttattgctagcaagtagaaaacacctacataggtagcttaggtgtcctaccattccataattcgaaagaaagccacggaagactcgcctaccggtattaacatcgcccttttatcgaatagtcgacgatgaagtgacgtgtacctggtttcaatcttgcctcgaacaaattacacattgagattcgacatgacatgaaatacgaaagtaatagagaactacaatagctactgtctcaatagaatgtcttcaaatagatttacagtacacacgagtacagactggcaacgtcttgatttggtccatggagtctgctccaattgctacaagacagacaggcctccgaggaaaagcgcaagaagaagatattccagcaccaagctcgtccataaagtatataccgaggtttccaaaaatgggttggcattgccagccctgtcgcgtgtcattggaaaaatcaagtatttctcttttgttttttggatagatttcgtatgacctgcagtgaggctcgtcattggatatcttttttgcattcagattggacaaatagtcctacactatatccaagtgtattgcatgaagatgatgaccaggggaggttgttgagagcgttgactcatatttactcgtcaccgccggtggtcttggtcttcttcttgctcttgttcttcttgttgccggtagagcgggcaaggggctgctcgagaatcttgaggatctcctcatcctcgagcttcttgtcagacttgatctgctcgagatcgacgggcttgggagcggcgagcttggtgagaccgttcttggtgatggctgtgagtggggttagcttatgggtccaaatcatcttcacgcaatttcaacggtacttaccaacggtggtcagcagacgagagacgggggaaccgtcagcctcgccagcaggctcgtactggcgcaggacaccgccacgaacacactcaacaacaccaaccttggcagccttctcgtcatcaagctgacgcaagctgaaggggaaagtaccgaacttcttgacaacctcagacagagtctggcgggagctggggcgcttcaggccgtaagtggtggtggtacggcggtgcagggtaggacggtgctcgaggttcttgaccttgccggatcccagactgaggccaacctcaacaccccaaacttcgccgacctcggggacaccgtcaccgcggacaccgttaccgggggagagaatgatcttcttatcgccctcaatctcgttgcggccgaacatccagctcgtggtgttctcgacgacattgcagtcgtaggtcttggcgatcttctcgagcagagaagacatgtaggcctgagtaggggccttctgagccgcggccttcttcttctcctcatcggtaccctgagccaaaagaccctggggaatcatgaggcgcaggagaacctcgttggcgtagtgagtagcgataatgagatcagcctcacggccggttatgggctccttgggggagtccttcttgggaacgacaactgtgtcgcaaacgatggttccgaatccatcgatctgagcaccaagctgaatcttgacgacctcgccggccttcagggtaatctcagcctcggcggcatcggacaccagaggggtgtagggagtcacataggagctaggggagacagtcgtggggtgagagatacctaagtttatatgttacggtaagttcatgtggtttgtctgccactcacggggttgagagtggggttgactaacccttgacaatcttcttgcccttgtagaccttggcgatttcctcctcaagaagcttgtcacccttctggcagatctcgacgatcttctctccctccaagcaaagagctacgtagatattagatcacaatgtgagacaataggaagttcttgcgcaacataccgataacagcgtcaaggacgttgtgagaaatttgcgcagcggtcttgtacttggtcaaggtatcggggttgttgagggtgtaatctagaaagaattgcataattagtcatggtctatgagccgaacgtatttctttgttgcggtgagtgccagcgagctcatggcccatgttgggctcagtgcccacaaacgtcagagctttccaccgcgatggagtttacataccaacaacctcgggtgctttgtcttccgccattctgaagtgaattgggctcgtggagctggaataaacaagtaaatgcaaatggtttcgcaaaaagagttcggattgtaatccgtgtgaagctcgaggagaggaataaaccgagatcgagtcgtgtgcagagcgtcgaggcgtttagcgttggtggggttgggtggtggtcgcctgatgtttcaggcctgtcacctagggctttgccgaagacgtcatggaaatctctcccttgacttcatactgagcgacgttgattcgcgttaagaaaacgtgtaactacagtttatctaggtggaatccatgtttctttcgctatctagaccgtaaatgtctcctctaccccggattccgccacaacccaggatcgcccagacttccagcctccaaccccgaacttctcctcacctgaccagtgtttcccctcttaaacattcctaggaagtacatcgatgtactcgggcttttgcctttcgaaacctacgatccttgctatccgagcgctgatttcataatcgaagaggccaatatgcaacttgaatggatttcgaacattaaaagactcgagtatatcaactgagcccatgccagtaggatagcagaggcttatttctcggagaccaagacaaattggctcagtggcggtgtgaatgtccagctggagatgaaatatatatttagaacttgattttctcttttcgatatatttccgcccttctctctagtattgtagccataatgttgaatcactagccgccagctgtagaatacctgtgaaaagcacagtgactttcatgattgaataccatacctatagtcatcggtgcatcgaggtgactgaaggtggttatactataacttgcctcaggcatagtaatagcctgaggcattgcgacattcccctcactcgttgtaaacccatgacatagaactatccatgtaaccacaccgttgttggttgtttgattctttattcttctgatttcaacactatgagttctatgaaacttccagtccgggtcttgacacacaatatccgatatgcaacctcatctcccttcaaaggcgaacgaccctgggcagaacgcaagcaattgctgttgaatgaatttaaatacgaggcccgtcattgtgaagaaaccttcatctgcctgcaagaagttcttcacaatcaacttgaggatattctggctggattgaatcaggacatggagcctggagcaccaaaatgggttcacatcggcgttggtagagatgatggtgacaaggccggggaatactctcctatcatctacaggccatcggtttgggacttactatactgggagacagtgtggttatccgagacaccggaaaggccatccaagagttgggacgcagcctccatccgcattgtcaccattggtgtcttcggtcatccggttagtcggaatgtggtccttgccatgaacacccatctggataatcaaggatctcaatctcgcctcgaggctgcacgtatcattaccggaataatttccgaatataaccagagaagattcccagagatcacgggcactttcttggccggcgatttcaacagcgaatataaccaggaagcttaccaagagttgacaaaaagcttgcttgatgcatatgagcaaatcgaaagctcgaaacgatatggtaaccacattacttggactggatttgggtacgaggatgagccagcctcacgtattgactatgttctggtgagacccaccggggctgacggtcagaagtcgacagtcactggctatgcagtgctagcaaatcggttcgacgatggtgttttgagctcggatcaccgcgctgttattgtggacttgacagttcagacttgaggatgtacatagcagaccacgagcatgccaagacgtccaggaccttccgaggtcacattatgtaacacacacgtggatcacatgacaataagtaaaattggtaaacagggtcataggctggcctggagcccatagatgagcattgggaataacctcaaaatatcttaaaggtagtattataccttattttataattcctttatggtggttgggcatgtagagtgaatggcgcgtttctttacgatcttagacgggtgcggacacttgtaacgggtactctccctctttctcctttgcctctttcaccatcaccccggctttaaaacaacagacaaccgccacagcttccgcagtttagaagaatctctcggggaaagaaactcgtcgattgggatcattgcagtcgattgacgaacaaggtcagctgacttggccccaaccgatccggagcggattctgcgctggaactcccgactggtccattcaaggaacatcggcaacagctctctcccccttcggccctggtatgttcgattgcttcccatttgggttcccagtccataatttcgatatgctgtccctattcaatccgtcgcataccctgaagtggtgacttgtggcgtgttcgggacatgcgcccgttgcgacacgtccatccaacaagctacattgcccaggtgacattggatgcacggtcgcgacggcgatggatagggtaatctactatctgaaaacatctgctaatcacgatttgatcgtatggacagattacatcccataatgctacggtagccgacccgaacctatccctgtcgcgttgagagccactccgagcttccaagatcatacgagtggcattagacgttcgttttgcattcatagaccatccaaaatgccatcccctgaagtgacgggtggctcgctgccctcagagcaatcattcggggaccctcagtcgggtgtccagaacagctctggcgcgtcggacacgggggaacaaggttcagacaacatcgaccttgggacaagccgatcaacaaatggtcatacgccagatacaatcgcagagggaaagcaaagcgcaaaggctatgcttgctgcttctggggtgtcagcctcgtcggaacccggcagtgaggtttccaatggcacgccccgttctaatgggacgcatggttccgtaagaaagagatctcatgatggatctgctgttcaatctacagaggtctccggaaccatggccgtacgcgcccgcgaaacgccactggataagattctcctggaacagtacgttgatcgcgaattccagcagtcggccgcagctgcctggaaaaatccgagtcaggagttacaaaagaataagcgagcggaacgcgacttttatttggcagtgcgacgcgaaaaccagttaaacccagcagcattgtatggcgtgggctatgagggattcggaaacccccgtaccgaccttcgcaatcaacaccctcaacttctctacccaactcatcgacgacgtcccggaaatagaaagacgcgagaactacgcatttcacgacgtgacgcaaagacgcagaatgaacagattgaggatttagtccctattcgcttggatattgattgggagaaagtcaagattcgcgatactttcacgtggaaccttcatgatcgtgttgtgtctcccgatttgttcgctgagaagctggtggaggatatgggtcttgcggtagagagctccgttcctctgacgaggatgatctcccaaagcatccaggagcaggtgatagactattacccgcatcttaacatacacgaagaccctcttgatccccaactaccctacaccgcgtacaaaaacgacgagatgcgcatttcggtcaaactcaacatcactattggccaacacactctcatcgaccagttcgagtgggatattaacgatcccaataattccccggaagaatttgcgttatgtatgacggatgatttatcgctctctggtgaatttactaccgccatcgcccattcaatccgcgaacagtcccaacttttcaccaaatccttatacattgtcgctcacccattcgatggccgtccaatcgaggacccagacctccacacctcattcctccccactcctgtggcttctgccttccgaccataccaatccgccaaagagcatacgccctatctatatgagttgaatgaggctgatcttgaacgtaccgaaatctcaatatcccgagagcaacgtcgccagaaacggtcgatcaaccgccgtggtggccctgctttgcctgatcttaaggaccgccaacgcacgattcgcaccatgattgtttcatccgtgatacccaactcagtgggctctctcgatgaaagcaatgtgatcaagcgtaccggttccagtcgccgtcgtggaatgactggaaaccggggcgatgatgactcagacgagtttgatagcgacgactcctctgttgactctcctgcgattggacccaaccttgcacagggcactgctcgtactagaggcatgagaggcgcggcatctgcagcccatgcggcgcttcgcgccagccttggacagtctgccacccctgaaccggtgtaccatgagccccgagtctcggcccgaagacagcaataccgagaagagagtgtcgatgactctgataagttgatagtgagattcaagatttcgcgcgacaagctggtcgatctgaggaacgggaggcgcattgtctctagcggacaagcatcacgcacgatggcacctccgtctgataaacagtcccgacttcatcctcccccgcgaccccaacaaaccggtgctgttgatgcaccaaaccctccgcagcctggtgtatctggcgtgagtagattttaaccccagtttttggcccatggctgaccctgtgtctatgcagcccccaccacccaactggctggcagctggtctcagcaagttgaaacaatctcaccccaacgattccttcgaaggcgtgatgcgttattccgccgttgataccgaaaccctggcccccgtgacgaatcccaacaacctccaggctggccaaaatatcaaataccaatacctcccccgtattcgttgccacgactgccccggaaagctttacactcccggcccgggcatgacagtggacaattttgaagtccatctgcgcaaccggcagcataaggagcgggtcgaagagcggctcacaaagactggtggcggtggtaccaactctgatggcggaagtgcgagtgccagccctaggattccggccaacgcaagtccagctcttgggactgcagcctctccctctccagccagtgggtctcagccatagtcaatctcgttcatgaagtgatgacaacggcgtcttgtgtgattatcttgtgtgattacttgtctctttcagatcgcttatattcttttacacatttgatcaattcaatccacctacttcttcttcatactcacgaagcctcccattctactcgtgtcttgcataggtttttggtttttcagtgccggaagcgatctatctttatccatctgttgggacccgatgaatctctggggcgtttgtgtttttcttgctttgctggaccatgtgtgtaatagttagcagtttgagagctggtttgagtcttggtaaatattcctgttcttttttctatggaatgatcttgtaggagtgatctcttacgtcacattgcaggctcgtaccttccctataacttataagccatcgcttcctataaaccaattccgcaggacacggaagaactacagtaagactggacgagatatgagtacgagactaccgcctagtactaggctcactcgtccattttctacgcacggcttcgataatgtgtacaatgcattcaaagaatcttccaaccttagccacctcgcagccgcgcttcttcaactacaatgtaaacaagtaattgagaagcaaagttcagttcatttacagatagaaagcaaatatctgacgggaatacgcaaagagacagatattcgtgagaacttcaagtagaaaaaaaaaaaaaaacaaggcagatggggtatacatctcggaccatcaccgactgcaaggaaacagagcacacgatggggacgaaattgtgaaaccataaagaagataatatgggcatcaggatatgaatatgaatatgaatatgaatatcgacggcaacaatccgcgcagtaatcgcacaacttattcggatctgagaacagcaactagatcgataccagacgtctatgtctcgaagatcttggcttaaaactcataagtaaatggccattgaaggtgtatgtctttgatgaaatgagaggcatggcccatatatgagaattcagctgaggggccgtgccaggcaggtcccatatagccctggaggttcttacccacgacgggaagagcgtcgcgaaggcatggttgtcgatagcttctttggctcaggcttcttgacatcgcccttggcagtagcggcctttccgcctcgcttctttgcaggaggcggcgtgggttccttctcactggcctctggctcatcatcgtcggcgagttctttatcgtcatcggtttcttgggcttcttcgttctcgctttcctccgcgtcatcttcgccatcatctttttccttgggtttattccactctgtcatctccatgtcggcatcatcgctgtcgttatcgatatagctgacttccgccttcgcggtgcctcggacgctgcgccggcgagaggaagtggtcatggcatctccagcgcctccgtcggaagaccagccgtcgtcgttctttgatttccgtctcggcttggcagctgcactgatcgacgatgtggacttgcgggcggaacgagatgacttttccttgcgtgcctttttggccacgaaggatttgccgttcgtatctagagactcgggttttcgcttcttgcttgatccgcccagtgaattgtgggtagagttattcctgggcttcattgcaattcggacgacgcgatcaagcagatcatccaactcgtctggaaggaaattcttgtcggcgacgtcttgggcttcccggtgattgctcatggaggtgaagagagagctagggacgcccattttcccaggataggtctgtaagatgttggttgcaccggcggcaccgccaagcttgtgctgttgggagtagatatctgcgaaccggcgaatagttgcttgtgccagatcagacagagtgtggaggcgggtggagatctcgtctgatttggtgatgccatcacggaattgcttgacgcgctgtccgacgtggaaaatcaatgacatgttgtgttcattggcaactgcggagaggtagaaaaggatatattgagagaagtcggtaaggtcgccgagtttcgttgcctcgtctagatcctcagacgggtaatcagggtggtaggcaagcaaagaaaggagacgagaaaagatcaattccatgaccatggtctgttccgtccgtttcccactagcttgcgcctgctgggcgaagtatgcggctcgggatcgcatccatgtgagcgtgctctcttttagactaggaacaggttcgaaagcaagcaaacaggggacaatgtaccaccggtggctcagatgtgacttctgcaccagtttctttttcaagtggttgatgaatccacttcgcacttgcaacagtgggtcctgggcaaccaaagcgattgcattgaaatctgatggcgtgagcagaccgtcgcagacagtgctggaagcacacagcttaagcaaggactttgcagcgaggaggcgaaggcgcggtttttggcatgcgggggtatcttttttcttagagatttcgccttcaccgaccactaatttattcaatgtttcgtagacaggctttgcgtgggcacggaagtcagcttcattatcggctccgtccttagccctaagacggttgacaatgattttcaatgcccattctttagccttggtctcatcatcaactgtctctgaccagttgtattcagagtctggttcgggtgtacgattggtgagcaggatttgggtgatggcaatcgaaatgatggcatcgcttttttcgtctgcttctctcggtgcaagaaggttcagctgcgacagagcagctaggcgagtgaggaatcgatcagagccgtacgtccacttctcaacgcacttctggaccaaatctttcgcatacatctcttttcggtcagccgtagccataagaattgaaacggcatgttttgcagaatgcggtgatgaactataaagggcatagttggccaaagcctggagaaacttgcggtctttggggagtttagcagggagctttttggcgaaaccagcacaagccttcaaaatatcctcggtactaccatcaccagccgaggaagccttgggagcttgcgcctcgaggtctttgcacatttcttggacttgtgcctctaggacttccggattttgagatgaaatttgcttcaacatctcctgtgcagcattggccaatccgttctcatctgttcgggacaaactcatgatcgccggaatgtggctccgattgaaaatcaaagacccacaacgatacacgagaggagtcaatgtttctagcaggggagagttgtttgcactctggacccgccgttggagttccttcgtggccttgacaacagtgcgataatcactcacagcagccatggtgaagcgaatgagctgatagctccgtcgatcatgcaccttagcgaacttccacaggtctgccgatgcgcgtggggcacctggaaaggttttggataatgactcaataatcttggacaactgtatcttaatcgattcttcgtccttgtcgacgacaccgccattgtacttctcgcaggcctctagataaagcgtcactgccgatctcatcgacaattgacgggccaacatgacgaaaaagactcgcctcgccttttcatccagtcctcggagtagggtaagaattcggcggactcgaatcttgtcaacatctgtctcttgctcgggttcagacgcctgactatccttctgcttctgtgattggttcgagttgcctcgggaaagtttcgttttgatggggggataaggaagtggcagaagcgtctcaaacaagacgcggtcgatcagaatatggatttcttgatcattggtgtagaatgcatcgaatatcttggatggtgcatctttgagaagggacacgacgggctccgtattttgctcgatgtcaccagcagccactgcccacatgcgagccaaaatcttcatggcgtgttcacgcacatgcggcttgcgatccttcactcgctcggcaagaatagcaagaaccgagtctggtgatgaacagccaccatccacacatagtttgttgattatttgggaatacccaaattgcccaacagtatccactgcagccacacgaaccttctcatcaacatcgcggagcatcgaggccatatttctgacaagactgtgttcttcgttttcgtgtaggccagagcctccagctgaggttagcaatattcgccccacaactgtgacccaggcagcacggactgatggtgtcttgtcgagacgacggctcaaaaaggcttcataggccgagttgtggacttgagagaaaggcttaggggatacgggagtcaacaaaacattgggctggggaatggtcttgtcataatccactagtgacactggggggtaagttgtggggtccatgggaggagggggcgggggacctgcaacaccgattccagccgcgaggtctccgatcgtctgagtcgccaataaacgtagggccactgattctgcagagagctctgcttcaatctgcgggataacattctgcaggacttctggacaagcacgccaaagctcccggatcaggcggtgtgccttactcaattctttgatatcctctccctcttcatcagagtcatcgagatgaggtttccgggcatgcttagagccatttgtttgaccagctggaacagatgcatcgatgatgacattgttaaagtactggctgatgtgactggtcattcgttccggacaggcctgacagatagccttcgccatgttataagcggccgggtagtctttcagtagaagcgtgtcctgcttggtgtcaagcggcgcatctggtcgctttcccttcttattggagctgtccatcactcgcgggtcgactcgaaggaattgggcgacgataacgtccaccacctcgggggccaggacgagcgattcatcgatcacagtgacgagcactcgggtcatgtcaaactcgacattcttagctacttcttcgccggtcgatgctttcgaagaacccgaaacgatgtcgaagcagcccgtgaacagcgggataatgagcgagtccggatgatcaagatcgaccatcagaaccacactcttgacctcggcgagagatcccaagacatagatatgctgggcattgtaggcgttggatgggtcggccaaagcggggattatcgatgacacgatacatgtgaatatatcctgatttgatcatagtcagcaccttattcaatcgcatagacaaaacacatattttgcaagatcttccatcgccacaccttcagttgattgcgcgtaaaaggcgcgtctggtgcgcatagtcgcaatacatcaacgatgcagcacgtagcccatgctctgacgcccttatccttgtgggcaagcaagttcccactggcaagttcctgtgacactttccgtagcgattccttatcaatttcctcctggtcgagcttgcggagttcctgtgcgagagtctggagacgttcgaggagatccgcgatggggatggcggagcgccccacacgccatgagagcggctggttgaaggatagactccgaagccccgagtcttcctccacctcggaaggacctgggcgagagcgcgaaggcatcgtggatggtcgcagttctcacatggactggggaggtggagagtttcgactcgggagtttgggtggaggttgaccgcccaggacgcgtcgcacgggaccgcgtcctgccctacaaagttggtactgaaggtgtcatacggtacatgctgagatcatttatttactttgaaaaagaatgtcaaatctgccagtgtcttgggcttacaactcatatcatattaattcatacctatctcacctggggcctaggttgcacttgctggtctaacccgggagccttctcttttaggaaagatacatcgctccagagctccttttaagagacaagggtaccctgtataacaaattctgggcattgctacgtatagctgtgaataatctagaggaaataattctggtgaagtttatataaaaggaaatggcggaattcccccctcccccaccaccaaggttctattgtttccgtttagtggatatcatgcgtacgttttttccagctcataacaaagcagcaggttaaataccatttatactcagatacattgctacatgtatatagagacccagttctagagatattaataatattgattaaaataactaactatgccttcagggatacatgacttgtcataaaacaacggagtagaccttctataacaaaaatcgtcggacttcatagatctgtcatcagaacaatgcaagtgaaaagcaaacctctaatgccatatatgtattcatgcgcctgaaaatgagagataggtggatcgaccacctagaacttaggactgaacttgctcatagcgcgaattctcgaaccgtagatgaagaacaaaataggaatggggatcatagcgacagtaatgaaacctagaacgctagatgcccaagccacacctagattgttgtacatttgtgtagcgaagagcggaaaggcgccacccatggttgagcggatgagagtattcgccgcgatggcggagttggcgaacatcatgtacacatcaataatgtagttgagaccctgcatgaagataaccaggatacctagaccgataggcacgccggcaataacctgcggcacccaggagatatttgggttggaagtccagccgaaccagaatagaccgattggcagcaacacagaggcgatcatcattggcacgaggcgctcttcgggaacgaccctgccatgtttttcaagtttgcgcgcaaaacgagtcttcgtggtgtatatgatgagacaggcaccgagcaaaacgccgataagaatgccgatgaatggaagggcagccacgccttcgtgggtccaaccgcgaacttcgccgaacgaaatcgggtaggcctcgaagaagaggtagaggattccgtaaacaagagcgaggtagatagtcatggcgagcaggatgggctcttgagtaagcatctggaagggtcgtaggaggtacttggtaacgatatctgaaaatgtgggctcgtgcagatccaagaaggcgtgaatggccgagttgccggtttccttgcgaagacgggcagctttcttttgcaagatgactgggccgtaggtctcgggaatgacgaagagagcaattagaccgaagaaggaggacgcaattagggtgatccatgcggtccaacgccagccaagagatgaatctgtgatgaagccaccgctgaagaatattagtgtctggatagtgctttgagggatgtctttaaggggtattttgaagagacaatttgagtacttacacaattgggccaagaacaggtcccatgaaagtagctgaactgaagagagcgatagccactgcgcgatcgacggggtcccagatatcagccagggcaccgccaacgacggccaaaggagagcagccaaagacacccatgagaaatcggcagaccaggatagtttcgaggttcttggcgacagcgacagggatctggaagatagcgaagacgaggtagcctgagaacagcgggatgcgacggccgtatagctcactcagcggtgcccagagcaggggacctagagcgaaaccaaacacaaccagactagtgccgagaatcatcacttcagttgatacattgaactccttcgcagtcaccagggtcgcagtcgaaaagacgctggatgcgaaggtgatccacacagtcataaaggacatggtaaatgtgatgatccatttgcgcagattgctgtagttctgggggttgtgagggtcatctttgccatcccagtcgacaaggttgggctctgcattggaaacagcgggcttttctagggtgtcgactgcgttctcgacatctgtttcgttcttctcatgaatagcgttggtgacgtccacctcctgttccatgctgaggcgaggtgtagttgtagttgaatcaaatggtggcggactcatggttgctctaaatacctatgtatataggtgtatgtgcgagacttccgccggtgtgttatgagagaagacaactttgggaaagaacattattgagacaggggccatatgacaatataacccccccccggaggtcccagaagggaataggctcggagctcaagacttccaaagctttgtaaaaaaaaaaggttgtggagaagctcattcggtatcggccgttcgctcctccactatgtccgcgatgtactcaaccccggatacatcagttggaaaagtcagattaaacagcgtcatgatctaggtcaggccaatgagagcctccttttttcatagagtccagtcgatccctaaccttgataatctatagccacctgggcatgtcacctagatgatcaaattatcttgatatacttccatggcgtcagtatatttccatgtggcgacgggtacgcaaaattacagaactagaaaaatcctgaactccatggaagtgggaaatggaccagttaaaagcacgcaaacgtacgaaaaagcacgaaattggttgcagttccggtccaactttcgctctggtcgctgtgttcgctctcggcttcaatttaaaaccgaagaaaagtggagatctcggcttcgggccaaaaactgaagtgccgagatttatatctcgggctgaaaggattgtccgagagattatcattgtctgagctagttatgtagtttgatgtatatgattgatcatataatcatgatctcataagcaagcacggagttagaacaacgggaatatctcctaggtatgtccggctactgttcttgcatcaacaaagcattacgaggacaagaaatacctctacctctgcggagtagataatcatgatttcaaggttgcacagtcaagaaaaggacatgacattcattacacgacatgaaacaacataaaaagcaagaaagacgacactacaaacactacaacaccaatgaacgtagagatttctctgtattggctattatggcacattgtatgtgggcaaaaacaggaagaaacgaatcgaaaaggaaaccccagcaaccaggcccgcatctccaccacgcaaaacgatctattcataagcgaatccgagcgcagaaacccgggcatgactgaactgaggaaaaacatgtcataccaccttctagcaaaagaagcgtttaatcgtagaggctgtcgtcattgccggcttcgccgaaggtatcgttctcctgaacttcgccagcagatgggaagcggaagaagctaccgcctccggtgttcttcaggctctgggcgaaggcctcgtagcggcggatctccacgtcgctaacagagcggcgggcagacttcatggcctcctcgaagtgagcgcgagtgagctcaggcacgggatcttccgcttcctcatcctccattgtgatgtcctcgccggcggcttcgcgctccttttggcggtcaatgtcggcggagatggcctgcttgatggcgagcttaacggcacgctgtgtcacgaagccgagatcggcaccggagaagccgtgggtcttgctggcaatgtaagcaatatcgacatcaccggcgacaggggtcttgcgaagctgggccttgaggataccctcacgagaatcctggtcaggcaagggaacgtagaccagggtatcaagacgaccaggacgaaccagagcggcatcgagctgctcaggacgattggtagcaccaatgacgaagacgttcttcttggaggtcataccgtccatctctgttaggaaattagtgaatattcggaacaaaatatagcaattaacagcggagacttaccagtaagaagttggttaacaacacggtcagaggcaccaccggcatcaccgacggagccaccacgagacttggcgatggagtccaattcgtcaaggaagacgacacaaggagcagcagcacgggccttatcgaagatatcacgaatgttgctttccgactcaccgaaccacatgcttagaagctcaggtcccttgacggagatgaagttggcagcacactcattggcaacagccttggccaacatggtcttaccagtaccaggaggaccatagaacagtacacctcgagaaggcgagagaccaaacttctggaacatctcggggtggtccacggggtattggacactttcgacaagctcgcgcttgacctcctcgagaccaccaatgtcgtcccagcgaacgttgggaacttcgaccacagcaacctcgcgcaaggcagaggggttggagacacccagggcaaagcggaagttctccatggtgacaccaagagcctcaagaacttcggcatcgatggtgtcctcatcgagatcaatgagatccatcttctcacgaatctgctgcatagcagcctcggagcagagggaagcaagatcagaaccaacgtaaccgtgggtctcggcggcaatggtctcgaggtcgacatcatcaccgagcttcatgttcttggtgtggatctgcatgatctcaagacggccagttgggtcggggataccgatatcgacctcacgatcgaaacggccgaaacgacgaagagcaggatcaatggagttgggacggttggtagcggccatgaccacaacgttggagcgggccttcataccgtccatgagggtgagcagctgggaaacaacacggcgctcgacctcgccgttggtcttgtcacgcttgggggcaatggagtcgatctcatcaatgaagatgatagccggggagttcttctcggcctcctcgaatgctttgcgcaagttcgattcggattcaccagccatcttcgacatgatctcgggaccgttgatcaggaagaagaaagcaccagtctcgttggcaacagcacgagccatcaaggtcttaccggtaccgggaggaccgtacataaggataccacgaggtggcttaataccaatggacttgaacagctgaggatgacggagaggcaactcgaccaattcacggatctgagccatctgcttgcggcatccaccaatatcatcgtagccaacctcgttgaggttgccctcctcatcctctcgttggatgggctcaccctcgcagtgaataattgtgtcctgggcaacaatgccgtattcgggagggtcgacctccacaaccttaaattcgatttgtctcataccacctcgtactgtgaacaggtcaccctgtcggactggacggtaggcctcgcggaagtagggagcaaggtagacatcgaagagagagccggtcagaccctcaatcgtatcagcgatgggaaggacggcaatgcgcttggcctagatcacgagcataaaattagccaatagatcatggtaaaagatgacgtggaaatgcacaacttacgtatttgatatcggggcaagggtgcacagtgatcatgtcgccgtgcttgacacgaaggttgtgacgcacaacccggttgatacgggcgcttccatcatcgagatcgtcatcggccaggacgatcagcacagtgtccttgcgcttcttacccttcacgagaactgtatcaccacggaagagctggagggtctccatggtgttgttcgagagggcaataaccgagttatcatcgttaacggcatcggtcacgctgggtgaaaactgtcagcttcttgcctccaacagatatctcttatcagctactcacatcaaggaattgggcttcttcttctttttcaagatagcggtggaggtatcgagctcctgcaattttcgtcagttccgagggcctttgtgagctgtcctgtagcctatgcttacctccttcttctcggcgcctgaagcgtccctggagtccagttagcatactcaatagtcaagagagttcaaatgaagcgtactgcaagtggaccctcttcttgtcatgcgtgtgatccggctcggaagacatgatgggcgtaaatgaggttgtggcggtgatggaagcaagcttgagtgaacaaaggtgtccagtgcccaaaaagagtcggagcgagacacggatttaaaatggaacgagaaatgagtactgaaaatgaaaaaaggaccgatagatcagaatcagagagcgaacccgatgacggcaaagtggagatagaggcaggtaacaggaatgatgatgttgagcttcctacctctgctcttagaactgatgatgatgacttaagcccggtgcttatgtcatcgcgttgtccgccacaacgaagcgcatggaactcattcgatcgggagccttgatgcctggggaacggccaacagtagatatggttaccaaggtccttacaataatacattcaggcgagaatcttggaacgattcaattataactacagcaaccctaaagagtaaatagaaagttcatggtgcacttgcttcagagttgaagaaattccaactctgggtgaccggttaagacaaggaatagatccatagcaatgccggccaacggcgagtcttctaagtcatcggatgaagacctatttggcctgttcaaatgctcaaataatggagaaaggtcgtacacttagaagcaagtgatatctttagttgtagattcagcaaaggcttggatcgaaagaaacgccctccaaatgttcaagccaggtctatattccgaaaactggtgtaaacctagaaaatgcaaagccaataacaaaccatgtgcgctgtcaacatcaggtatatatgcaagtaggaggatattcgttacaaataggaaaagaaggaaaaggccgagaaccaccacaagtaatctaatagctatgccttgacacttgcggttccagcccagcagtcatggagactccaagctccggcgcagaagctgataagcccggtcaagctatcaggaataccgatgcctttctcgagacaccagtgcagacacaagggtgcccagatgacgttgttcaccatgctctttcgccaagcccggatctccaaacgcagtgcctcgctatcttcggccttggtctctttagtctcgaccgtgccggcagccgctcgttgtgcggctaaccgttgtctgcgtagcacactctggcgccagagcacaaagaactggaagaagatgtgcccgaaccatccacgggtactccagatttcccatttggcaacgccgccatatttgtccacgaaccgcttcgagaccacccccttggaagcaagatagcccacgttctcgagaagctggtagatcacgtttgagatgacctgcagtacggttagggcgtggagaatggggtcggctggcggcgatttgagggtgtcagctccccagatccacaaagggagcagcccgaacagtcgcaaattgtatctcgtctccgatgcgagggaggaaagggccgcgaatttcgattttgacgatgcgggagtgacgttcttggtgggtacacgaccctttagccgcgcaaggatacccagctttgtttgcaatgctatccagggcgctgatgcagtgaggtggtggagcattgaggcgacatagttgatagtcgctagtactcgctcttgcccatttgcctcggaaagtagtctgcgggagcggtcagcgatattcttgccgcgccccggaacataggattgaaggaggccttacagatccagccgacggattgtcacatcggttgttgtcaaggcggctagcagctgccgtttcgcgcatgagctcctggcgggtgcttgcccaggcggggcatcagtcgcctcgcctggaaggtgttcagggtcggacatcgtgtatgatgaacataagaaaaagcgaaataaaatgtggaggtggaatcgcacaagcggaaccgaggctcggaacttgaggaagttcgatctaatctccgagggtcattattccccagcatttcggtcatctgacatgacgttaaccatatcttgagtaaccatacggagtagttagttagttgactaattagtgtataactatatttttctcgtagctatcttgctggcttatattaaagcatacaaattaattaaagcctactgacaccttgatccgctttacgtgcttagttctatactatggcttcacaggatacctaatttaacatcatttacatagtctacatctttctagtaacttttacttttacttaaaatcatgcttggaaattcttcatttcgggggaaatcccctagtcctcacatgtggaatccgaattccaccccatcctcctctcacatgccgctcaccccccgctcaccccggcctgacttcgacctcacctccacctcttcctcaccccggcttcaccctccctcactcccctcccctctccccaccgtgaatgtagcaatgcccaaatgggccatgaataaccccgaagggcaagaaaaacaacaaaattgtgaggaccctagtcctcaccgaagggatctgccgtcgatccctgctcgtggtcagactcacgctgccacggcgaaggcaggattcgccagtccgtttggggctggaagtcccaatcgacggtgctcgtccttggtggacgattggcgaggaggttctccaatcgtctgagctcccgctcgtgacgttgtctctcacctcgctgctcgcggaggtcatgtaaccgccgacggaatcgacggccggtgtggcgaccggcgaatccgagatgttgccgagcacgaccaaggcgaccggacgactcatgattgttgtcacggcgcgattggaagtatcgtcgaatgttacccacaagacgtcgaatattgcccacaagaccggtgggtgtgccctcgtcggagcttgcataagctgcataggagtgatcgctcgcagtggtgatgaacgacattcttgccattgaacggccgtttggatcctcgacctggaagccagaaggatacggcgccatgccggagtggtcgctggcagtggtgatctctgacattcttctcatttcataagcatcctcaacctggaagccagaaagatgcggcgccatgccggagtggtcgctcgcagtggtaatgagtgacattcttgtcattgaatagccgtttggatcctcgacctggaagctagaaggatacggcgccatgccggagtggtcgctggcagtggtgataagtgatattcttgagattgaatgacccctcggttcctcggtgatgaatgaggtcgtcacttgaggctcttgtgactcggcctggaagccagaaggctgcggcgtctccgcggaacggcgtgaaggcatgactggtgtcatgtcgggatgtgtcgttcctgacagaaatggtattattgcggatgagaaagcacaagaaatgagatgtaaggactcgcggtgtgctgccaggagccttacacgcaggaaaggagagatgcttgatacttcacccggcgactggaagccgaagaagtaacgcttgattgcgaaccgacaaggtcgccggtgtacggccagaaggcctacacgtggggaaaggtacttgatacttcacctggcgactgggagccgaggaagtacgtcagtcacgatccttgagtgtgaactaacaaggttgccggtatgctgccagaaggcctgcacacgggaaagacgttgcaatgtgatgagaagtgataaagcagatggaattaagatgaatcaatgaagagaaggggtgaaaggatgattggaagaaatgaaaggatgggtgggagagaaggaaacaaatgaggagcggtggtgttcaagtactccaggcgtgtggtcgccataatttggatcgcatcgtcgctgactcgttcgttgactcgtcggggccagcggtttatggaatgagctccatgatcgcatttttccagcgacaaccccgacggcgacctaggtgaggtgagccgcgtttacgcggtatgtaacccattgattcctttgcacatactgctcaaacagcataggtctaaatcgcagagcgtaactataatgataaacagttgtcattctgacttctgtttatacagaatcaccgatacttggcaaatgttccatccatcacattgcctggttgctgctcactggctcatgtatagatttggctgaagtgttatattccgacactggaccgagacatagctataacaagcttgaatggcacaagggcttgctttatgtctatcaactattcgggggatgccgtcaaaatacgttctgcaaccatgcagggagagatgtggtgattcttattgattaccttacctctagagctctgttacctagaagaatatgggctaatagactagattttggattgccagactaccggtttgatagatgataaagaggcatacactccgtagtcacgggtaatgaagtataggctatgtatgttgtatagaactcactacaggtctaagccgacaaatcccatatctctacatatataattcatttagtcttgagcgactaattcagctacagaaaccacaaacatagaagagagacaatccataagcctaggggtgttaaaagaagtgataaccccgtgaccatgaaagccctggcattgcaccaaaaacgacaaacagtgaacttccaagattcattatgatcaggatctaaaaaaaacatagatctatataataaaatatacagcataaacatataaaatacatacaacatactccgtatacaacgttgttaatgataggggtaaaatcgtcaaagcccccagatccaaccaaaagccgtcgggggtttccgatgggctccgccaatggatctcgccggggatccatccaccgattgttcgtatagccgtctcgatttcctggatatattcttccgacagaatttatttagtcggagagtgattcaagggagatattttgtgtgagttatatattgacggcctcggctgtcctcccccatatcccatcccagcccagccaccctcggaccgacataaacaaacacgccccccccccccccctaccccccctattttggnnnnnnnnnnnnnnnnnnnnnnnnnnnnnnnnnnnnnnnnnnnnnnnnnnnnnnnnnnnnnnnnnnnnnnnnnnnnnnnnnnnnnnnnnnnnnnnnnnnnnnnnnnnnnnnnnnnnnnnnnnnnnnnnnnnnnnnnnnnnnnnnnnnnnnnnnnnnnnnnnnnnnnnnnnnnnnnnnnnnnnnnnnnnnnnnnnnnnnnnnnnnnnnnnnnnnnnnnnnnnnnnnnnnnnnnnnnnnnnnnnnnnnnnnnnnnnnnnnnnnnnnnngaacaccgcccccccccccccagtctcaccccatcgtgtcttcccattttctccacttggcatcttatcatccattgcatgttaatcccattcacattattaacttattttaggcgcgtgtgtaatctgaaaagctctcttaattcctcctgaaccctcctgactcctgccctcctccaaccccctccgatccccacaatgtccgtcaagttccaagaggagaccgtccgcaccgtcacgggcggcggcaagtctgaagacctagcgcatcgcgtcggtgagcgattgaccggtggaaagacagcggctgggtatctccaggtatgcagcgcctacccctccaataacatcgagccaacactgatccggggaatggatcgtcaataggcatacctccttcagctccagaagaaccctctgcgcacgaagatgctcacctctggtgtgctctccggtctgcaggaactgctagcttcgtggatcgcccacgatgtcggcaagcacggccactacttcagctcgcgcatccccaagatgtcgctgtacggaatgttcatcagcgcgcccctcggccacgttctcatcgggatcctgcagaagattttcgccggccgcacaagtctcaaggccaagatcctgcagattctcgttagcaatctgattgtacgtcgtcgctgcgatcacctgtcctgagattcgctaatattcccccgttccccagatctcccccatccagaacagtgtctacctgacctccatggctattatcgccggtgcgcgcaccatccaccaggttcgcgctaccgtcaaggctggcttcatgcccgtcatgaaggtcagctggatcacctcgcccctgtgtttggccttcgctcagaagttcctccctgagcacacctgggtgcccttcttcaacgttgttggattcttcattggaacctatgtcaacacccacaccaagaagaagcgtctggaagctctccggaaggtatgattttatttcttggaatttgcgacttgattgctaacgactcggcagcgttacgaccagcgtcgcgaccccagctacgagaagcgcgacttcccttaaatgggccgagtccgcaattgactgcaaatacacccggacgcgtcgaagacctatgtgtgtcgtctcttccggcttgtctgctgtcacttggttatcctttgtttactattctccggtgtcgatctaaatccatgtacacacccccgtgcatcttgacatgccgcagatatctcccccttgatgttatcactcaacctcatgacgaatggctttatatctctgttttatttcaattccaacccttgaagatcggtatatatatcttcttttcagttgagctagtcgcgccgttctacctctgctcatctataccgctatatacatacactagtcgggatagctataatcgaatgaactgcaactgcccttgacatgaaaacggcacaatgtggccattatgaattctgtcgtaactatgaaagatctgacacacagggtgtcaatggatgatacaagtgggtgggcaaggtacaagtagacatggccagcccacccgaaaatgagaagacacaaatccctcacatccaacatccacgaagaggccagaggctaccttattcaacctccatctctgaggcctttccccgcttagcctgaacccaggcaacaaagtcatccagagcaccgggccaagccccatcaggactccaccagcccatctcctcatcttcgagactcttgcgcataaacacctcaacctgctcccacagatccttgttaacaggcttcttcccgcgctcttcgaggaactcgatccaccaatccagccacggggtcgtttcggtgttccaggcgacaccaccatggtcagttgtgaagaaaagacgccactgctcggcggcgatttcgaattgcaggttgcgctgtccttgcatccgtgagagcgggaatgcgtatctgtagactcgtcggaagaccgctggctcttgtgggatgacctcccggaggtacttggcgtacgcttgcattttaggcagggtgtcgcagcttgtgggttgttagattggataaataacattgaggatgatttgagtccgggttgaagtgggttttcttcgttgatgttgtacttaccgaacgttcagccatccgtccctccatccctggcgggtgaactcgcccatcgatggtgacttgagtagctcggcgatggctaggcaggttacttcgtcgagctcgacattcaaatcgccgaggtaatctatggctcgtgtgataccgatggtatctgggctctcgactgggtcatctgggaagacatgagtatttgtataaaatcactagtcaagaatgagtaaatacctcggtagctttcgaagagctttgtaaattcggaagtcacaactgcagcagtgccagccgcggcggcgaagaaactattccagtgataacgttagcatcgaagcatttcaagagttgtccatgtatgatatcttgagagcgggatggtcaggtatatggtcgtggggctagggaagggcaatcacttcttcttcgcctttctcggcttcttgactcgaggcatttgggacgatgaagtatgtagtgagagattcaaactttccccaagtgagacttaggaaaggctgagaaggaaagatgctctagcgacctgctagcatcttgggacttatgtgcaggtaggggttggagacaaataaaacaaagcgacacaaaagtcaggtacaattatgatgacaagcacttacgcgtcaagcgcgggagccaaactccatccacatgctttgaggaactatatcagaaagttagtcctttttgatcccacgtgaccggatagaagcatctcaagatatccaagcagaccacacaggagagaatatgccggtaaaacatgcaagttactcactttcacagcaacagactcctttgtccgtgtacagctgacaaactcagcgattagatgcttctggttgcttgtgtatggtggcatggtggtggttgacaatatgtgtgtccactacgcgcgggagaaatgaaataagtggtgaaaacacgcggggggctaaaagcaccagatttgtagtgtgcgcgtgagagaaactatgctcggctaagaagttacgagaaacaccagggctatgaggactgtagtgagttatcatctggagctgcccgtgatcatggtgctgactcatcatgtcctccaaacagtcctaatatcaactacaacccgggctatacatccatgaatagacttggcatgaggttttattttcattacattggacatggatttgtgagtattcagagtatgtattttcatatagtaaccattacagagaagtttgtggtcaacatttgccatcaattcatcacattaggagcaatgagcacgggattcgatggtaaaaagtacagtcaacttttgtaagatcagatagatcaggtagaactcccaaacgccttttgcaagttgcaaacatgtaagattcggtgttcgaattcgtttaggtggtgaacaacgtatcctcctattatggatgttagcaatttgatccttgataagttgaagatagatccaactcacttctctgaggtactctcctgcgtcggcctgttcatttgagttagccaatgtaagtaaaaacctagagctgagctccacctacctgacgatggatcgcgatactggtaggatctaattttgcgatctgcgcggatgaccttgctgtaactccgaatcccagggggacgtcgttggagtccagaatcacaattccctggttttctgcgacatcctcactagaagacggtcagccttgaaaaaggatactcatttagatgataaccaacctgaacctagccacgtgggctttcaaaaccgaaccgccatacaacagaggctgaaacttgttagcagggtacagcagaccctatcgaagttgagatatcaagcttaccatcactccgtttgctttgatccagacctgtgccagagatatagagttagcatgcctggttgaaatgcttagattgtgatacgtaccttgtatcgggcgtgttgcgccaggagatccagagctgttaggttgatgcggaacttgccagtctgccataatattagcatcactgatcagaatatgaacagagcttatagcactcgccttagtgtattttcctatcatagtgcccatgctgagaagctgatcgcgcgggaatgagatgctcaggttggcaatctccttgttcacgtagtaaacccgggatccttgcaagcggaaaacactcatggatccatcttcggctggggtaataagagaattgagactgcggccggtataggaagctagcttcgtgaagagcgtccgtgtctcttcctaaaagcgtgataggttagtcaaagtaatcaatggtcattgcatttagtacgcacttctgtgagggatctcatattggcggatatgaagctgaaaatatggcaaaacagttgagtagcaacgagcttgtattgtcgggaggtgaggagcaagaaaaaaaaccaatgtcgggcaatatctcaccgccaagaagcggacctgaaatttatagcgatggaccggacatgaatagccaatcagagcaatgtttgtctttccgcctagaattttcgggaccgccttttcactctaaagatattttttactattctccgcaaatttcaccgtcaattccccaaatctccagctacaaaatggcgcgtggtccagaagtgaagcggagacgattgagtcctccagccgatgttgaggactcctcatcgcgctccaaagccgaccaagagtgggatgttgagcaagactacgaacgtcgcccgcgcaagaacaccaagaaagctggcgagaacgcacgattgccaatcaaaacatctgaaggctttgtccaggccgaagccgagcctgcagaccagggcgaggaaaccgacagctttctgggtaccgatgatgacgaggaggatggctctgagggcgaggacggagaagaatctgaggaagaagcacccaagattccggtgaagctacaaatcttgcaggcaaaggaagagctagctaagatggcaaccttgatcaacgaagatcccgaggagcacatctctttgttcaaaacaatggccgagatggtgtcgaaaaaatacacacctgtcacagttaagaagctggctctagcctcacaggcggctctctacaaggatgttattcccggataccgtattcgtccattgagcgaagaggaccagactggcagggtatcaaaggaagtgcgcaagctccgagacttcgaacagtcccttgtggcaggatatcgagcttatgtccagaagcttgctatgctggtcaagccatccaaacaagatggccccacagatgctggactgaggagcttcgcgatttcgatggcttgtactatgctcttagccgtgccacacttcaatttccgcagcgagctcctgaagatcttggtgaaccgccttgcacggagaaaacttgatgccgactatgttaagtgccgtgaaaccatggaggaagtatttgccaaagatgacgatggaaccgtttccctcgaagctgttcgtctgctagcaaagatgttgaaggccagggacttccacattcaccccagtgttttggacacattcctccatcttcgtttgctcggcgagttccacttgaaggcgtctcgagaccgagtggaccgggaagaagaagaagtcccccatggaaagaagccaaagcaaaagcgtgaattccgcacgaagcgagagcgcaaggttcaaaaggagcgaaaggaagtcgagaaggatatgcgacaagcagacgcagtggtatcgcacgaacaaagagacaagaaccaggccgaaacattaaagcttgtattcggactctatttccgcattctcaagctccgcattcccgaactgatgggtcctgtgcttgagggtctggcgaaatatgcccatcttattaaccaggacttcttcggtgatttgctcgaagctctgaaagacctgattaatcacgcagagcgcgaggaaatgggcgtagaaggcgaccaggaggtcgtcaacgaggaagacgacgaagatgaagacaatgtcacaattgccgaaagcgcagcccgggacgctcgccgaaggacgctgctctgcaccgtgactgccttcgccctactagaaggccaagaagccagcaaagccgccgcaggtctccacctcgacctgaacttcttcatcaagcacctctaccgatccctctactccctctccatgaacccagacgtcgagttcaacccagacacagccctccgcctccccgaccccaactcctccgcggaaggcaaacagctctctgagtcccgctccaaaaacaaggtcaacttccagaccccgatggtcctcctcctccgctgcttgcagccaactctgttatctcgcgcacacggcaacccgcccccaagccgacttgccagtttctccaagcgtctgatgacgacttctctccagttgccggagaagtctgctcttgcaacacttgcgcttatgaaccaagtctcgaaatatcatggtcgtcgtatctcttcgctgtggcatacagaggagcgcaaaggtgatggtgtgttcaatgcttttgctgctgatattgaagctaccaatgtctttgctggtacggtgtgggagggtgaactgttgcgtgtgcattactgtccacaggtgagagaggcggcggttgagattgaaaagatgatgatgtcttctaagtaaatactgtaaatactgttttgaataattttacatgcatatccagctacaatctactctacttggaaatttataatcaaacatcttcattgacatgctaatccacacaggaaatctcacaaagctggccccatgtcctccaaatccaacaaagagatgagagctggttttttggggggggggggggggggttttggttttccatttttttttgtttttttttttctggttgtacttgcatcatgttgagcactggcatggctcgcaagtaagcgagcttacctgcgagcccccatccttgccaggctcaactgggggacacgcggcccgaaggctccgcggtccggatcgtggagatcccgacctcatttggctgaggccgggacagagtgtgaacgtcggcgagtgggacgggcacatcaccgacagcatcccgggggatgcgaattccctaaggaatggtgggcacagagggggctgcctccccctcggtggtctccttcgcggaagaagagctggcggacttcttcgagcccctcttcttcgaccgacgaggaatcgaactctttgcagagctcgatcctggcgaagtcattgtcgcggacgccgcgactggtactgggggagccgccgttgctggcgaaattgctccaaccccagaggacacacgagtcctcagggtcccagtgggtgcaacggtatcccgtgcaggcaaagggttgggtggaagaatcctttccacgtcatcagacatcttgagtccgtgctcatcttgcaggactcggagagcagtgttgctgcggatcagcatctgtctcaagtagagaagctgctttccgtggtcttcagtctgagacccgatctcctcaatatcctcgtcgatctctttgttctttcgacgttggtaggccaggaattgctcatcggggttgtccgttcccccgaggcacatgtcgactttggcactcaggttaccgaaagacgaggtcagctcgttgatgtcgctgcgcatgtcgtgaaccacctccttgatttcggcgacctgttccttgaggtcgtgaacctgctccttgacgtcatccacgtcaagcttcgccttggtaacctcgaaagacatgtcagactggcgctcaagttgggcatccatttggtccttaatgtagtcccgggtcacggtaacaaagtcatcgactttctgttcgagcttgttgatgttgtcgatcttctttgacagtcgctgaatgtctgtctcataacgatactgaagagatcgaacagcctcaggaagatctttgagagtcaagttggaacgtggcacggtggtaagactgacaccgctagtgcgctccatggaactaagactgggacggtgcatgtcatcccttctgaagatgggtgcgcgagggctgggtgtgtgaaggtcgtatctaggagacacggggagtggcttgttgttgccatccggaaagtcaggatttccagccatcttgggtggagatgggggagcagaacaagagcgaggtttgaattcagtcagggtgaggttgcccggtcgattcttcaggatggagattggaagaggagggacaggggggatggaagaagaacggagagtggtagcacggagagaagaacgagaagggtgggaagaaaggtgggaggggaattttccttgttgctgtgcgaacgcgttacgtttgttaagcgaaggctcaggcagttccaaggactgcgaactgctgcctgcgacactgccagaaggcaaaccaaccttaggattggtcgacttgacaggggcagacactgggactgcagtgacagtcacgtcagaacggggagatgccagtgggttacacatgtcgggctcgtcgaattgtacgatctgggagagggtgctgcgacgagaacgagacgaagttgcagaggagggagtgtcagggcggccagtacggnnnnnnnnnnnnnnnnnnnnnnnnnnnnnnnnnnnnnnnnnnnnnnnnnnnnnnnnnnnnnnnnnnnnnnnnnnnnnnnnnnnnnnnnnnnnnnnnnnnnnnnnnnnnnnnnnnnnnnnnnnnnnnnnnnnnnnnnnnnnnnnnnnnnnnnnnnnnnnnnnnnnnnnnnnnnnnnnnnnnnnnnnnnnnnnnnnnnnnnnnnnnnnnnnnnnnnnnnnnnnnnnnnnnnnnnnnnnnnnnnnnnnnnnnnnnnnnnnnnnnnnnnnnnnnnnnnnnnnnnnnnnnnnnnnnnnnnnnnnnnnngcggggccgcggggaccttccgaatcggtgtctgttaggaaatcaagtgtcagtgactcatgttaacccttcttgcttcgaaataaacaggaagtgaaagccttcaattgaccatgtgagaccaaagtcatagatatctctcatgtttttgagtgtctctttctctatcgtttctttcgaggcatattctatgagcaaagaatgattcctttacccacaggacttgcttctatagaaaggaccaccatagagaggggtttgcctgtacagagccaagcatctgacctcaaggaatcaaccgcaataccaaagaaaggaatatgattcaaagaaccgatccatagctcaagaaagagatctgattcaaaagaatcatgccgattctatagcaaggtacccgattcccaggagccaagctgatgtccgattctgcaggcagaatggcccaatccaccctattctcaagaaccggctcaatctcacagagaagaaacccaattcccaagagccaggctcaaccccacagagaagagacctgattcccagaagcgaggctcaatcccataaggaggagacctgattattgggagccaggctcaggctcataggaagactaggttccgatgaaaagggaaaaggcccagttccatggtgtgctcgatagacacggggcccatgtccaccgaaagagacactccatgaggtaaaaggcgatgaatgcttcaaaaatgaagggaatctactaaccttgactttttctcgccattttcctgatgttttccagagcaaatggtgaaagttgtgataatggttgggagaaaagaagaaaaggaagacgtgtgtgtggcaacaacaagcgaagaggacagggtcaacaaccgcggacacgtgcccgagggactatgatgacaaccaccattgagaccgaagggaaggcacggctgcctaagaccttattatggctcatatacccatatcgaaggagccttccacgtgggcacttcatggcccaggttctctgtatttgacatactcgaatcgaagatacggacaccaacacaccagcaacgaaacgcaaaggcaaagagaatctctacctaaagaaaagctggcaaagtcgcaagtctatataccaactttccaacatgttacgcatacacaaaagcatagtgaagtgcaacaatccaagaacaaaggaagtccagcacatagaatccaatacatatgcaaagaaaccagaagattacaggcaaacaagcacaaagacagttcaagtagaatttattcatcaaattcatgtcataagtatactggataagtagcaagccagacagatccatcaagagcggccggcaatgccaacaccaacatagcattggagacaacaaaaggaaatcattaaccataagatgtaagcaaagcaaagcaaaacgcaaatgaaattcgtaaatatgaaccaggaacagataatacaggggaataaaatcagtgagtgggttgggggacacccggagaggttttatacttcgtggtgccacgcacatcccgtaattccacggatatagatcctcgaacttccaagggctcctggatacacgtgaccgtcaccgccaccgcctccggcagtatcgagaatcgacggctcaagaataaccccagaagatcgcgagaaagggcatggcaaaaatcgcaatgaaaaacaaattgctgatcgagcgtcagttaatcagcttgaaaacagaatttgcatcatgaccacaaatttcttcaacagtgagagataggagagagacacaaggaaataaaaacagttggctagaagacaaagcacgggaaaacacaagattcagtctaattggaggccttgtggcgacggaaaggtgaaaagatggccccaaagaaattcacaaagacagtgcgcaggattgctttgagccagctgtcaggtgcaccatttagagaaacagcagtcactgaccggttctgactcgacgagcgagcatcctcatcattattctttggtgtaagcgcattgtcggcatcaggctgagcgtcggatgcatttgcagcgggttcggtaattcctttgctggcctcggcggcaggctgggactcggtggcactttcgactgtcgcgaccgatggttgctgggtagccgtgggcagttggtctgtagggggttggttgagcttgctaagaagggcttcgcggtcgccagcaagagctgcaagagcgggatcagtttcgagagatatggcagacggttggtatgaagtatagaacggtgttggcttaccgtctgtggactgtgcatctgctgcgggaacctggggctgggtctcagccttcggaacggattccttgtctgcattggtctctgctgcagtctcggattcgtggtgagcaacagcggccacgctggcgccagcaatggcggcagcgacagcagcaccagcaccaagaatctcggtgctgatgccagtatcctcggtggcttcgtcagaggcggacctagcggtctcttcttgcttggcttcgggctcagttggtgccgatgtttcgatatcagaggtggagggctgaatcgactccttcacatcagatgtctcagcgacaatctcgggctcgtctgcataggaaatcgactcagaaatagccacaacatcgacctcatttgcagaaatggtctccacgacaaaagtagactgttctaggacctcagcgttggcatcctcttgtacgggctcttcgacaacctcagcaacaactggcgcttcggctgcagcctcttcagcaacgacggcgggctgctcgatgacaacttcctccagcacagttgtctcgggctcgagctccttagtagattcctccactggagctgcctcgggagtttgctccgcgggagcagcagcttcaacgggctcttcaaccttcacaggctcttcggtaacctgctcctccacgactggtacttcagcaacttcaatagcctggatagtgggctcaacaatgacgggctcagtcacatcctcggccttatcagtagctggtgcctcagtagcagattcttcaacaacgggtgccacctcgggagtctgttcggggacagactcagcagtagactcagctgcggtttcgagaacagcaattggctcatcgatggtcttttcttcgacaacgggagtttcagcaacagcgggctcggcaatgacagcctcggccacggccacggccgcagcagcggcagcaacttcaacagcctctgaaacagtgactggctcatccacgggcttctcttcggcgacagcaggctcagcgttttgagaaacaggctcttcaacagtggcagcggcagcagtctcggtctgctcagagacgactggctcagcaacaccttcaatctcgggttgcttcttctcgaccttctcggcctcgtctgcagtaacatcagcgacggtaggagcctcggtggaagacttgatgggctcctcgacgataagttccttggcggactcaacgggagtctcttccaccaccggctctggggcagaggtctcagcaacgggctcttcgatggccttgtcagcaacgagctcttcggttgtctgctcggttacttcctcaggcttggtagcttccggctgctcaacggcgacttccttggcagtttcagcggggacagtctcctccactggttcttgcacagactcaataggagtggcgttttcctcaacaatggcggcggcagcctgaggaatagtagcagtagattcctcagtgacatgagcagcggcagcagctgcgggaatggcggcggtttcagtggtctcggaagcagcgacagactcctcagtgagagtagcggcagcagcagcctcagcaatggcggtctcaacaacgggagactcctcaggagtcaattccttagtggtttcaacaacaggctccgccacaactggttcctctgctgcggcctgttcggtggtctccttgacagactcgacctcaataggctcctgagccttctcagcagtggcctcctcggcgacaacggtggcaggctcttcaattgcttcggtggtgggctcagtggtggttgtctccacggcagcaacctcagtgggctcctcgacagcagattccttgacagcatcgacagtctgctcgggaatgggctcagcaatctcggtctccttgattggctcagcagtcgattcctcagtgacaggttgctcaacgggagtctcttcagccacctccttggtaggctcggaaacctcgacagtcggctccacagcagttgcctctgaagcaatttctggaacagcaacggtggtgtcagcactgttctcggcctccacctccacagtcggttcctggacagccttctcggttactggctcctcggcaggcttggactcttccacggctgcttcggtggcgggggtatcctggacggtttcagggacgacaatggtggattcttccaccgcgggggtttcttcgacagcttcgggagcagcatcgacggccttttccgcggcgagaggctcagcaacctcctcaaccttggattcttcgactacgggggtctcttgaacggtctcgggggtagcctcgacagttttggattcgtccacggcgggagtttcttcgacgataggctctgccatagtctcaggaatagcctcgacgggcttggattcttccacggcagcttcagcggcgggagtctcctcgacaaccggttcagcaacgctttcggcaacagactcggcgggcttcgactcttctgtggcggattcagcggtgggcttttcttcggtgatagcctctgcgacagtttcaggagcagcctcggtggtcttttcttcagtagtaggctcttccttggtaataggctcagcaacctcctcgaccttggattcctcgactgcgggtgtctcctgggcgatttcaggggcagcctcgacgggcttggattcttccacggcgggagtttcttcgatgacagtttctgcaacagtttcaggggtagcctcgacagccgtttcctcaggaatgggcttctcctcagtgataggttcagcaacctcgacggccttagattcttccacagtgggggtttcggaggcggtctcgacagctttttcttcgctagcaggtgtagcaacctcctcagccttagattcttccacagcaggctcggcgacagtctcagaaatggtctcaacgggctttgattcttccaagacagcttcagcggtgggggtctcctcggcgacagtctcggggacgacttcggcagtcttttcctctgcggtggtttctatgacaggcttcgattcttcaactgcgggcgactcctgggcgatttcaggaataggctcctcggccttggattcttccacagcgggggtttcggaggcggtctcgacagccttttcttcggtggcaggcgtagcaatctcctcagccttggattcttccacagtaggctctgcagcggtttcagaagcggtctcaacgggttttgattcttccaaggcagcttcagcggcgggagtctcctgggcgatttcaggaataagctcctcggccttggattcttccacagcgggggtttcggaggcggtctcgacagccttttcttcagcaggtgtagcaacctcttcggtcttggattcttccacggcgggagtttcttcgacaagctctgcgacagcaacaggagcgtcctcgacagccttttcttccacggcaggcttctcctcggtgatgggctcagcaacctcagcctgggattcttcagcgctaggggtcttttcggtgacagtctcggggacggcctcgatggccttttcttctgtggcgttttcggctgtttctgcggaaggcttcgattcctcaacggcgggcgactcctgtgcaatttcaggaacaacctcctcggtcttggattcctccacggcgggagtttcttcgacggccttttcttcagtggcaggcgtctcgattagatcggcaacctcaaccttgggttcttcgacgggagtctcctgggcgatttcaggaatagcctcctcggccttggattctgaaacagctggagtctcttcgacgataggctctgcgacagcctcggtagtcttttcttccgtggcagcttcagtggtaggctcggaaacttcctcagccttggattcttcgacagcgggcgcctgggcgatttcaggaacagcttccacagtcttcgattcctccatggcgggagtctcttcgacgacaggctctgcgatggtttcaggagtagtgtcgacgggttttgattcttccacggcagtttcagtggcagtctcttccttggcagcttcaggaacggcctcgacagtctctgactcttccttggtaggttcagtgatatcctccaccgccttggattcttccacgacagcttcggcaggctgctcaacggcagcctcagcggaagtggcctcggtagccgtttcctcgatggtaggcttctcttcggtggtaggctcctcctcgacagtcttgatttctgccgcgggaggctcttcggcgatcggctcggcggcgacttcaggaacggcctcggcagtctttagctcgtccgtgataggctcagcaacctcgggttctacattggtggaagcgacaggcttttcctccaccactggctcggcagcgggcgcagctgccttgggagcttcgactggtgattcctccacgggctcggcagaattttctcgcgtcgaagcagccagggagctaatactctcctgtctcttttgctgcttcttctttgccttcttggccttcttcctttccgcggcggtcaaggggacctcgggttgggttgcatctttggattgtggtgctgtggagtcgagcgaggcagtcgattcgctcagatctgccttggtcgcgctggcagtggatttctcatctgagaaagaaattggttcaactggtgcatctgttggcagcacatggctttccgggatcagtggctcttgcacgctggccatggtttatttcgtttcaaggtcgtaatgtcgtaaaaagatgatggatgggatattaggagattgggggtttttcacaatttgaccagcaaagatttaacgctagatttatcgtgtacagaaaacacaagctcacagagcaaaagggcaatggattattgtgagagtatgggaggaggggaaaaaggcagaaaaaaatctcagcccaaaatgtacaaaaaaaaaaaggcccgtcacggcacagctcacagtggggaaacagttggcatagtgactacatggcgcttttcctctttggtcttttcgtctttcacctctggagcatcgctggagctcgacgtccaatggccgctcgtactttgcgcgctctttcatccggctctccacttccaatatgcggtgaagctggccgaggtttattgtttgaccttctcgctttttgcttcttctggcggtgcaaccgtatgatatacagtcggtggactatcttgatacaacatctgcctcgtttcccctccttctggtggcacagtccaaacgacaaccccgtcaatcgaacccgaattgggcgctaaaaaagcgtcgacccccaattgataaaccggcgccaatggcaggccgcaaggttcttatccacctgtcatatggtccttgagtcattattgcagtgatccccaaaataaaaggacaacatatggtggatgttccattttcaatagtttctccacggattggctgatgtttttttttctctggctcagggcccatatatgcggaacactacggatcgccattctattatttctccgtacgacgcagcgcccaatttcaaggatccggaatctacagatttcgcaaaagctcgtgcctcacactagtagctctcgtgcattgcgtgctgcgtgcgacctccctaagcttgggcctccgaagccgcttttccggctcaaagcacaagcacatagctgcagtaatctgcactggcctgagctttctgcagttcctaggaagactgaacttttgtattccaccgactttcgtctactccgtagttcgtcccagcagatatatatacgcgggtgtggtcggcttcccggtcccgaagcggactccgcaggagaggccaatctaacggagtaaaaatagtatacggaggagttggaccagattgaacccgagtgttggtcttgttctccttttcaaaccccactagtctcctcccgggggggaattatcggctatcgttgcctaggtaaaatcaagtctggttagtggagtatatgcggaggcggaagattaaggggagcttgtatacgatatataaatatgaggttggttttgataccgaatgcttataccaggtgtctccatatcgactaattttaacctattgagcaagttcctcactaatgtctatgcttacactcggaccaacataattagggctttccctcattaggcatttattaggtaagtctagcccaagtgctcagctgcctatttgggaaggtacgatgcggtcagagaacgaaggttaattttcctcttggcataatgtttagacgggacaacgaataattattgtgtataactagcaaagatgtagaagctacctgaccatatgtactagaaaacgatacaaatatcaaggccatcagccacaaatagctacttcctcctcttctcttctttccaaacaccctttcatatcaaacactgcctcgtcttcagggccgaggtatttccctagggtctgtgtataatgttatgattgaaaaagaatcaagactaaaaaatgaaagaagtcatcgcctgagatccaacgggatggatggggatccaagaggcagtgcatcaaagtcaccaacggcggccatccacttctttatactgagcagtgtcatttctcagggaaatgagctttcagccaggctagcgacatcaactgcacaactaacagccatacttcaaccggagccccagtgtccataagaacagacggcccgactatacattgagtttctcgtgcattagtaccatataagcagcagccgctcttgagctagtggatactcaggatcacccgtgctttcgagaccaagaggtctccgcatcgtttgagcatacgcttggcaatcagggactcaagggtatggtcaaactcccacttgtgagacacaagactcgctgaggacaagatgctatcgttctgaaggacgatggaaatagtctctcttatgcatggaatgcggctgtaattgtcgcgggtcgatgagacaacaagtggaaccgaaacccctttaaaccattccatggcggcattgaagatcaacgccgcgggaaccatgctaatgtacgccttagctcatgacccgtagcccacctaggtgggtaggccgtttctggtgcttggtcaacccataaatccggggctggggccccaactttagccaagatcgttagtcaactcttgtcattacggagcagatattagttttgataggccatcttttgtcacagagccagatttgttcttcaccctccgtggtttgcaagatcctcgtgaatattagacgcagtacaggtatttctaaagtcggaaggagccttgccatgtatgagagacttgtccacgagcttatgaattctgacaacgaggagcattggtttctgatggggatatcaatatcaccagagtatcgtggttagatatggccggttgcaatggtgaaggcaagtggccgctcaaattatgttgtttgtatgtactaccagcggaggaatagctgaatatcccggaccggcgaaaatgcaaggatccttactcagcaaaggagctcccggtccgaccaggaggtgttctgacgctaaacccaaactggcaaggctaacccgaaaaggaagccattccatgtttgtggggtagctcaggtacccgcttctctccaccttcgccacaggcacagaactgtcgaccacggagtatataggggcaattcatattctcggggaattcaggaaggctggagagtattataggtcgaatgcgatggggacaaaggggtgatagcacgttccacaagaagtcccacaccgaaggcacataattgacacgcaactaattccaggcagcagagttaatcgaggaataagtgcataagactataatacatgctccagaacatacaacataacatacaacatgtaaatcagagatcagccctatccggggtgggtccaagcggtcagccctacgagaatttgatcgacgctttcctactgatctcccacattttattctctcctattatttctctccagagtgactgtcaactcccacatctgacgtgagaatgacctactatcaagacctgctgtgattggtcagagtcaattgttttggtcaatcaacactaaaagcacgacatcgcgtaccgaagtatatgagccatcagccctatggttcgggccttatggacgcaatatggctatcattactagccattccccttttcttctttcttcttcaactcctcttctctatagcaatctggcgagccgctggttgtgaccctctagactacaaagagccggaaaagacccgacgcaacaatggcggagactatctcgactcgagtcggtcacgctttcgcaaagcttttacgtattgatttgagtccaattccctcggtcgtcggagatgacaccaggacttatggctattacgagcgtgagcctacggtgggcgactggtttcgaggtcatacacctaccgctcctcaagttcgtcgctacgtttggggcctcttttctttcctccattggatcgggtattacaacgtgcaatggctgattggggatctcgtggcaggtgagaaactccatttgaatagtcaaatacagatactaatctgcagctcttgacaggcattactgttggcgccgtggtcattccacagggtatggcatacgctgagctagccaagctgcccccagagtacggtctctattcttcgttcatgggggtcttgatctattggttcttcgcaacgtccaaggacatcactattggggtaggatcagtccgttctttcctgggaaacaaacacctaacactctcagcccgtggcggtcatgtctacgctcatgggttcaatcatcatcagggttcaagcagttcaccccgaaatatctccaccggtccttgcttccgctctggccatcatttgcggtgcgatcgtgttattcctcggattgctgcgtcttggcttcatcgtcgacttcattccccttcctgctatcaccgctttcatgactgggtccgccatcaatgtttgtgcaggtcaagtgaagacagtcctcggagagaaagcgcatttctctacgcgtggggcaacctataagatcatcattgatacgctgaagcatctcccatccgctcggatggacgctgctatgggtctcacagcgttggcaatgttatatggtatacggtctgcgtgcaactacggaacgaggaagcagccccacaaggccaaactgttcttctttctgtcgacattgcgcactgcctttgtcgttctcttctacaccatgatcagcgctgcggtcaatctccatcgacgcgaccatcctgccttcaagctactcggtaatgtcccccgcggattcaaggctgcaggagttcccaaaatagatattccaattatcaaggcatttcttggtgagctccctgcggctgtgattgttctgctgattgagcatattgctatctcgaaatcattcggtcgtgtcaacaactataccattgacccatcgcaggagtttattgcaattggcatatcgaacctactcggtccgttcttgggtgcatacccagctacaggttcattctcccgaactgctatcaaagcaaagtgcggcgtacgaactcccctcgcgggtgtgatcactgccgttgtcgtccttcttgccatttatgcgctgcctgccttgttcttcttcattcccaaatcgtccttgtcggccgtgatcatccacgcagtaggagatctcgttacaccgccgcgtatcacctatcaattctgacgtgtatctccaattgacgcactcatcttcttcatgggcgttatcgtgatcatattctcaaccatcgagaccggaatttactgcacaatcgccgtctcactagcagtactccttttccgacttgccaaagcccggggtcaattcctgggatacattcaggtccattcagtcgtgggtgaccatatcctcaacgcatcccagggggacccaaacacagaattcgaagatgataccgaaggatctcgaagaatctacctcccaaccgagcatgacggtggcacaaacccccgaatcaagatccaccagccagccccaggaatcttcatctacagagtctccgaaggattcaactaccccaatgcaaaccactacacagaccacctagtcagccacatcttcaaagcgacccggcgcacaaacccacaagcatgggaaacaacaggcgacagaccctggaacgaccctggtccaacccgcgccgaacgcaaacttcttctgtcggaggaagcacccacttccccactcccaactctgcgcgctataattctcgatttcgccgccgtcaacaacgtagacgtcacatccgtgcagaacctcatcgacgtccgcaaccagcttgaccgttgggcatccccagacagcgtgcagtggcactttgcgaacatccacaacaaatggacgaagcgtgctctcgcagccgccggcttcgggttccccaccgtctcagatgggacaggtcctcgatgccagaggtcgatctttaatgttgcggagatattggatggcggactacctgcgttagtaactcagtctcaagtcggcgggttggaggaatggtcaaaggacttggaagttggcctgaatgtgcaggagagcagtgcctcgtcggtgatggatgtcactgaggataatatccaggttgtgcagactggtgagagtacgaaggttaatacccatcgtcgtcgcggtcgatctggtgtcggtacttgtatggcggccgttgatggaatcaaccggcctttcttccatgtggacctgactagtgctctgaagagttctatggctgattcttaggatgcagatgctggcttgctttccgtttaatacttgctcgctttctttgactggctttagcccttattagggagaacttcaatctaatgaataagcctatatagctcttgaatttatcaattcaacatggattatttcaagctgcaatttgactaggcatccaacaactttttatatacctgttatctacgctacagtcagtttattcaccggaactctgctgggaaatccctctgagttgtagagctcaagactgacggtgtcggatctcgatcgcgcagatcgaaaactagtcctaatggcgtatagctagtggattccgatgatcttatctgtggctgaagaacggtcatgtgcacagctccaaagcacgaattactacctacaacctactccgtagactgactcagagtgtgtaactatatcatatagaatgcttaagaggatagatcgttcgcaacctgaaataatgcatctccgccatccatagcattgccaattaacaatgccgaggcaaacatgtacgttgtacacgcgaccaatgttttcaatcccggaaagatgaaacacacaaccaatgatttccagtatacgcgctggttcatattccctttccgggatgagactgacgcatctcacggcattgactcggaataccctcggtatccgatgcatccgtatccgtcgagcaggagcagctagctcccaacaaaatcaatctacagctacaggaagcatttcgcttcgcgccggaatccccactgcccggtaccggatctggccggtctggtacaacataccagcatgtacatatatccgcagcttgaagataggggacaggaacgtgggtctgtgacggaacgcgtcgaaggctacgatatacgcaatgaccggtctacatatgttgtgggcaagacaccagggccgtctgtggcgggggcggtgaatattgacgtgtgtttcgctgacagcgcgagcgcgagcctgaggtggctgttgttacggcctggatcgtgcctgaaacgtgtttcgtactcggtgtggttgctgggatcagaccgcgttgatcgagggacgtgtgcaggccagacagtcggtgcgagagtcgatgttttcgggcagatccgggagggcgtggaaagtgagcgcggtagattgtcgttcctgggatcataagccgcggctcatggtttcgttctcgaggctcgcgttgggttatgggaatatatttggtgatttgggtatgtagtagtactgcgcgggctttgaatccgtgggggcggataactatatcgacggaagaataatggcttatgcgctgtccagcgcatcagctgcgagtagcgagtagcgctggcgctagggccgtcggtgcatgtgtttctttttcagccgagggcgtgagtgcggttgtgcggttcaagggaaggaagagttgactacgagttctaaccaccggggggcacatttgctcttatgttagaatagagagagtggatatagtttgagaaagagactaagctatggatactgtgtgtgtcttatgccattacggcaatactgcgtacacgagtgtacaggcgctgaggctatacaatatacgatgccaagtggcctctcgcatgacctcacgggcaggtcaatgatgagttgatgagtcgccgagttgagtattaccgtaccgtattggtatttacccgattacacccggacggggccgtcttcacttatacaacagttctgttcttattctttttcttcttcttctttactcaattgctgtagtcaattgcaattgcaataactgtaactattattattcccaattcctatgttgtatgttatatgtatatcaaccgcgttgatagctagaacacgtaactgcaccctgaatcgagcttgtgtgggtccgccaagctgcgaccaaccgaagttcccaaaaatcgaatttccgggagaaacgcgaagagcctctggttagcccgtttgggatgcttgaattcggtgcagatgcgacgggggtaggtcggtctatataagggtctcgcaccccgttcaaatggctgaatggccgtttaccgttactgcaaaggttctgtaatcttctttagggcaatccggaaagaccagatttcactgcgatagccggattacggcgggtcgtaaatccagaagtggagctgcgaaagcaaggacacgacaaccgggttttggttatgttttggtttttttggttttcgtttccttgcttatggcgtttccaatcttctgcctcgtccccccccctgctatatatctacttaagaatccaactcctgcaggtccgatgcatggcttttacctccctcggcaagcctggggaggataccgaagctgttcggagtaccggatccgtacagaattacgtattttccaaatatgaccactcggtgaggtggattcccgagggacgaagggggagacgatatccacctcatccacattatttggctcctttcagccggtggttgcccagtgactccgtagttggtggacctggaatccgagtcgggccggtttgggtgacgccgggaacaaatccaagagagatagtgggcccgagaggattatgattggagaagaggagcttggaggtggatcgacccaccagattggaacatgcttaagatccaccgcaagggttggattattgtgattttgattttacgattttattattttataattacaacttgtatttccattttcttctcatgttatccctttgtgcaattcgattctacaattggtatccgtacaccgtactccctaggtccaatatattccatgtacatgctaggtataccgctaaaccttgaaaccccatgcaggggatatagataactcagacccatacccttcgacgaatcacacccagtggacccagttggaacaatacccgactgatcccgacaggtcgcaatacgcggtaagaatgcccattacacacccatacgcacccccagcattcctcacggtgtattctgcgtatcagtccacgcacaacttagggcttttttcttaccttacacagacactaagaccgactaggaggcggacgggcgaaaatttggccgtagagtatttatgtcctagtgagtgccgtctcccgtagtttcccagctttttctccctgaaaagtccatctctctcctctttctttctttctcctctcttccacccaccctataattctataaacccatccatcgcaatggccacctctcgtgtcttcgcctcccgcatggcctcggtcatggcccagacctccaaggtcgcccgccctgctgcccgcttccagctcaacgctgccaccaagcgcaccttcacccagaaggcccccgccttcggtgcccccaagcgcatccagtcgcccactctcctccaggccaaggctttccagactgccgcccgccgccagtactcctccgaggtcgcctccgccatggttgaggtctccaagaacatcggtatgggttccgccgccatcggtctcggtggtgccggtatcggtatcggtctcgtcttcgccgctctcctcatgagtgtctcccgcaaccctgccctccgtggccagctcttctcctacgccattctcggctttgccttcgtcgaggccatgggtctcttcgatctcatggttgccatgatgtgcaagtacgtctaaattatctacgactcgggttttcggattcttggaaaaatgtcatcaaaacaaggattttgggttttttgagagaatctctttttctgccggggagggtatttggtcgtgatgtattaccatgtactactttcagcgtcatctacaacacttttctttctgtacatatagagtcctatatggcccatcgaccatccaacctatcaaagagccaaacgaaaaactctgtgtgttgcgtctgacggccgtataatattctctttccttttcctagttcttccccatggggtgagattgtatgtataacgcctgaatgagttactttgctcccaagctcagaactccacgtagacaagctaaaagctataaacccggggcgatcctagctcgatcttgacaacaaacagctggtctttttggcgcttgttatatcccgctctagccgatgttgctacgggtcctgcagcattcgacccgctcttcaacttgcaactacgccagaactaccacccattggcctacaataaacggcgagagtgaactacagagccttcacaatgtgatcgagctatttgatcccaaagaatcagtcctggcggttcttaatgagcctgagaccctcgacgcaagattcttagctccgggacctcgggaacggctttcccgtagtcagctgactcaacctgtgaagtgacatcagcctcggattccagggctacagatcgaggttctgcatgcagcatgcagattgaaggtgaagcaagtcatatttcattgcgaactaggtgttttgtgaattcgctattttggggttggggtaaagctctgatgctcggcaacttccccgtttatatctacgaacccggtctagtccgctttcagttagtgacaatatcaagtatatcttggtgatattaatgagatctcatggatacttctttttgtggattatatgtttataccttggggggttttgtaatttggtaaaggtccaactgagcaatatatatactgtctctaggcttggtttttgaggttcaatatatacattggcgactaccaaatcacatcaatcttgaattatttttctgttattcttatttttcttctgtttaatttgggaaatacaagaatagaaatcacagtaatcaaaagagacttagactctaatcatcattgaggcgagaagagcaatacacgcgttaatacacccagccgacatgctcacactcctgctggaagaaaaagctcaagtgcatcaataaatatacttcatatgaataagataagaccaatgttaacagaagacctgcaagaacgatcacgaaagactccaaacatgccataatcgctcgataaaccgataaaaccaaaacgctgatggggaatatgtatcaccaggactcgaaaagaaagccccaaaccccaagtgtaagcgcatcaaagcaagccaaaaaccaagaagagagcaagacacaccagctagaaaatttccagatcctcaaactcaaccaccaacccatccgccgaacccgtcgccaaagaagcatgcatatcatcccacatcgcaccagcccgcgacagacccgtcggccgactcgcataagccccaacatgaacaaacttatcctccaccccataaaagaaccacgtcacctcgcgcagcttcttccacgtattccccaccgcaccgggcgacagcgcgaacggcgacgccgacggaacctggtaccaaatccacagcgcgtggccgacacgctcgagcttgatacgcagcgagtggatagccagtccggcctgagccgactgcgccagcggcgacaaacaccagtccgcgccatcggccgtcgcgctcaccgacgacgcgttcaccgttcccgacgagaactccattccggctttgacccatttgcagggtgagcgcggtgcgttgcggaagccccgcggtccgtcgacttcggaggagaaggattgcggcgcggcgccggcgaatattaccagtccgccttggtcccattccagttcccagtctgcgctcacggtcacctctgctacgacgaaggcgtggcggagggatgtgaagacgattggggcggtggaggtttcgccgttgggtggtttgcgccagaggtctgtgtttggacctgcgcggagggtgaagtattccatgcactggggtagttcgaatgtcggtggcaggtttagtgccgtgaaggttgaaccatctggaggcatttttgattttgagattttgggatttcttgaattgggtctccaccgttcttaataggtgggaaaaaggaaaatagttgtagagtcacactgtgtggtgcctcgagaataggaataccccggatgagctgcagttgatcactcttaaatccttcagcgatgacgctggggtcacaacatttgcctctaaagtttaagcaggcgcactaatccgagcaaagcaaatcatgcacgatgcatacgcatagaaggcagaaaaaaaaatcttgggatatgatgcagtcgagaattgagatacgccgaatgcgggttgcgccagacctggaaatgggaacaccgaaaaaaagcaaaaggaaagtaaagagaatgagaaaaagagaaaaagaaggtgattgaatcaattattatggcttgaactacgcagtacttatatagcgagaccaaatgtcggcttccccctaatggaattcaggggatgatctgctcatgtccggccggggatggccgtatcaaggaagccagaaccagagtgctggggactgaaccaagctgttgggctccctgccgcgctagagtcatgttctttatggtcgatttctttgaggccctcgagaagcgtgcttgcatagcttcggcgacagatggcctgcgggccagttcgcaagtggcgggtcaccatgcatctggggatccatcacgatgtgacggggcttctaagaggagcatgaaaggtcctttaggcccaaaggacacaaggggcatacagaacaaggaatagggcgaatgtgtgccgtggacagctgtccgggctgaaaatgaaagaacatgcagtcgagaaatattttcatcatccatactggagaaattatacttcaacatatcgaggatcgatcggaacaatgcaggacgcatgaactgggtggaactcagattcgggggagctgagaattgtctagggatcttccctggtcggtggtttgacagcttacaggaagggcaaaaaggcttctgtttttattttatcccgactgcggttttcgctctccaattaggtgttctgcacgaggctgaagagggtaatcttggatgtttcatggggatcctggaccagatgtacaacattctaagatgtaagtgtaagtgagatgtaagtataggatagaagaaggaacctctgctaaattgtccacttcttctatatctcttgtacggagtatgaagatgaagtaaaatctaatcagctaacctgtttctttttatagaaggccttggcttgtgattgtttcttttccttcgtactttcgccttaacggtgtgtgttggcatcttcgggcgcaacttcactattcttacgcctttctcgcctttctcgcttaacaccaaatacgtctcatccctttctcccttgaattccaactcaaagaatacgccccgcgctagcatgcgaatatgcacggggcgaagtgcaggtcccaaaaagggggccaacccccgagaagcgaagccaactcgtattttggcctggagctcgccctcccaagactaactcagggctttggaccaatcaaagcagccccattgacatcttggcttcgtatttgaagacccttggcctcaatccgagcaactgcactcgtgcggaggatttgcttgagccccctgatccatttatttaaatgccatccatttcgtaaaatctggggaaattgttagatcttagatttccccagagctaagcagaacaaaacaaattgcaaaaatggcgcctcgacgcggcagcggaagctattccagctatgtcgacgataatccgtggagcgacacgacctggctgtcactggagcattactacccggacgaatacaagcctctctttatcacccaatttgtctttgatatcatttccctcctcgcgttcgtcgccttcctcatttgggcatgcagaatcagaaatcgtagtctcccgctgaaagcactcatttgcgctctgatttcctctatatggtatgtggaaagatctggactaaataaacaatccgctaaccagtgggtcacagctgccaaataaacatcatcgcctgggaagccctatatgtggctgaggcgcaggtgacgatgtactatttgatcagcttgatgctctgggacttattcaaagtcgttgcgatctgcctcaccttctatgtcttctggaacctcatccatcgcctcctgggatttattagagtctccggcaagccacacgcggcagtgaccaccatccattatctcctcctcggtattattttcgtggcctctcttgccgaatggggcatgtgtgttgcttcttacgtgcgaagcgtggtttccactctcaacgccgatatgcagtggtcctggacacagctgaatgtcgcggtgtatatcatctattggctgctgtcattggagattctcgcctggggaatcttcctggcgatcaaggctcgcagctatgctttctggtcaaaggtgaatctcactccaatagtttctatggtatacaccaactaattggctatcagtcgcccgctatggcactcgtcgccgctgccatctcctggtgcgctgtgtgttccaccctggccatcatttacattcgctatagcctgatgcctacctctgcatatgactggccgatatacctggacgccgccagaactattgtacagttcgtgctctgggtcggcacttacactggtcttctcctgtgttgtgcgaaatggcacaacctcgaccaggggccgaagtatcccgcacctgattatcagtctcagttccccgagggacactaccctcagattcaacagccatatgatattcctccgtacgtggatcattcaacacagcaccaggcccacccgcaccatgtctcgacctagtaaggttcatgttaaggtctgattctgctgaggtctactgattgatttcctatgattttgactttgtgagagtttctattacagtgatacttcttttaatgtgtataccgaccgtttaatgttgatacccaatacgatgcgaatgatagcaatgcaatcctttttgaacaaaacattgtatgaagcatatttccagtatgcctcaaataacaccctagaacctagaaaaacacaataaaccaaaaaagccactcataaaacatgaagaagcaagtagacaaaaacgtcttggcagaccaggcggtggcgcaaacccgcgacaacatcatcttcattttcgccatcaagccttcgctcgatcaacacccactttcacatctcacaaaatggtctgctcgaaatgccaaaagaagctcaaagccactgagctcgccacccctggcgtcaagcgcaagaacgacatgtactacggctcgccgtctagtacactcggtggcggcgcagacaagggaaaggcgaagccgacactaggcgccacgggaatcggaaaggtatgttacagaattttctgtttgatactttgaattaaggagaattatcactattctggataagttgtatactgacattccctccagagcaagctcctcagcgcgaaagcgaagaatccttatgcggcttatgcttcgtcttgtgataactgcaaggtgaagacggagatagggaggaagttttgccagcggtgcgcttatcagaggaatggtatgttgctgtattatttgccctttgttcgttgcatatgctgatatcgatactagcctgtgccatgtgcggcaagaatctggcggggaagtcggtcaaggaccagcctattgtccagggacagaagttcaacatggcatgaagtgcttgtgggttagatctgggcgattacagccttttattttctgttttacattgcatggcgttgggcgttgacgataccgcggaatattagataaacatcgatattgaactgaaatgaacttgatttgacagtgtaggaaaattctagttatacatggcatgcgcaataagagtatatgcaatgcgacaccaatggtgcgctataagatcggaacaagtatgccttttcatctcctgaagaacattgaacctcgcgttctccttcccagctcccttcatctgcttccatcacctcttaacggtcggccagcatgttcttgatgttgctgtagtattgcgtgttcaagtattgcgggagctcctccttggcgagccacttgaagtccttgaggccctgggtgttgacggacagatcggcctggccggccatcatacgagacttcaaaaagaagatcttgctgccgggaacctcgatctcgttgcctgccttcttggagtggcgggggttgaaggagtgccatccgaccgggtggaaaccgaccatccaggtgttcatgttgacaccggcggactgggcgagggtgcgttcagcagcctagagtaaaatagtattagtatgattcctaaactcaatgcggttcaaaagtatagcactcaccaagcgaagggtctcgcccgactctaccggcgagctggggaacttccagtgtccctccttggactgaacaaggagatagagagtacgggaaagcaaacgatcgagactcttttggtcgttcttcttgtctgcctccgtgatccgaggatacggccgaggaatttcttcctttttgctggtatcttgggaagtcgcattggcagtggattctgcgtcctggacaagagcctcaatctggtgttcaggctcagactcctgtgctcctagcaggagctcgtcgttccatgcatcgctgtcgtacgcgttgtaatgtccgatatcacgcgcggcagtccggcgctcctggatcttcttcttccagtcttcgtcggctggtgttccgcgtttgaagtagaaatatttcgtaaagggaagggcgagacgctcattcagtcgtttctggtagaaaaagaacgctttctcgaacggttcgagttcacgggtgatttggggagggcgggagaggactacaccggcgttgatgatgtaggctggcttcacggcggagtcggccgctgttgatgcggaggtcgattcgattgctggtgctgccgaggaatagctgcggcggctaatggtctcttgacagcttctgcacacgccggagtcgactattgatggccctgcgcgcggagtcagtatcaggaatccgggcaaaaagttcaattggacatacgcaatagcgaggccacgcgccgtgcaccattagatcctgacgacatcttcaagagtggaatggcaatgtgtttggggctgatcggtgtcttgtctccccgagaaaaagatccaaccaggtcacgttgtcgccaggcccgattgggattagtcaccgcccgggcgctttaaatttcaaaattcgacttccactttcttcccttctccaagcatctcttatcatcactgcgtccagttctctacggccggttgatcatttaaaggtgctcagagtgagctcctcctgagatcgcggccaattttcgctagcggtaccttcttaaaaaatcaaggcgtactgttagatagctgccgcgaacatccccttagtcttacggctgtgtgctttgatagaaatccatttttaccattttaccttcattcttttctaatttctcctccgcaagtatttccagaaccaacacctaaacctcccctcaaatctccaccagcagctcttcctgttttggcacctctcttcctagttgcaccatcctctcctgtgtaccgaacacccgcagtatgttgccgtaggtatcccagaaggcatctccgaggcgcgggagtaatttgccctgatcgaccagacgagtgatacgcccggaaccagtgtcggctagggatgtaccagcttgagcgatctgggctgcttgaatcaatgggattgtctcggtgtcaacatcaaagaagttgttgaattccttcttggtaacagcctggttgttgctaggctgtgccatgataccggcaaccaaactgggtgctgtggtcgttggccggcgtttgatgcgttgtatattgcctgccagtttgatgaaggccatggcggcaagcatgctatcgtatcctgcctcatgggtactcttacggaacttgtacttcgcaaagcgagggtcgatctctgcaaaatgattagctgtgctcgcttgctgtcaatgatataactcatgtcctacctatcttggggctttctattccagctaaagtcgtgttgagatcttcaagcgaagacatagggtttagagagccgcagtcgtgagtggccatgtacttggtatccgcgagcacggggaatagctcgtggatggcggtctggaactcggcgagggtattcggcaacggacctaagaagcatgcgtggaagaagagcagatcgcagaacatgttgtggccgactagaatcggtctgttctctttgagccgactcttcactttgtctgacaactgctggattccgaaagtcggctgctcgatgaccttcatcagaggatggaaagcgtctgcttcaagttcgtccaggcttccacccacaagcgcttctgcgatccagcggaacccgatatgcttccggattcgttcctttttgaccttcaatttcgcctccaaggtagactgctcattgcatgggtcccgcaattcgatctggacgaacgttgatgcaccccgcgacgttaagttggggtattcgtcgctgataaggtggtgtatcagccatttctgcatgctagtcagcccggtaggtatgggtcctggaacaagctggatgctgctgggtggcgggatgttgagccactcgcggcgtttctatatatgtcaattgatgtattcaaatcaacgtttgatacaacatcttacctcgccctgtgccagccactcattgacactgatccgaacggcctcaaggaactccagagattcatgatcgtctttcttaatatccacaacttggacagggttccgttggcatttctctgcagctcttctgattgccaattgttcttcctctcgagataggtatcgaacaccgaaggtgcacatgtggtcaatgctgaagtggttagcaagcaagaattccattgctgttcagggagatattagcgtatgctcaacatattgtagatatcggacatacagcggcttccgaatgtccagtcccgattcaaatccatctcacgctgggtgattggactcagatttatgttgtacggtttcagggtgtaggtggctatagatggttagcgggacacgtcttgcactagggttaatccgtacctttttccttatcttcatgacaagttgtcagcccaacttgaagaatctgataccgctctgcagccaatttggcttccacatatcgttcctgcacagtctggggccgggactttggtgtactggatttgaaagccaccccagacagctcgaagtctacggacacgaagcagctggtggagatgtcgttcagtatggaggataggcaatcgggaaaggtgacagccgtgatatccatcttggttcaaagttgggaacagcaccgaagtatgagcgtagtgaatgaagataagaggtgaaaaggaaagagttggctttgttgaagtactgattgctagacaaaagaagagtatgcattaggaaggcaggtatccgcgtttaattgatcacaaagagcactgcgttgcgtgtagtttgtagaaagggtgatactttgtcgacagtcgacaggatgatatagcttgaaagtttactggtctacgctgttgagtctgatagaccagagttgtgataggagcaaagaagaagagagagatagatgaggaaatagtgatataatatgtataaaaatttgaagcatttaccagattctggttctctatagatagcaaggattgaatatgcatctttttgtcaagaaatccttcgcaggttctcaaagtacattctctattgcttcagaaatacagcatatagcttcacaagcaatatctatcttaaccctaggagttagctcagttggagtgtataaatgaccgaggcaacatcctggcgatgtttatgtccaattggaatagcacaggctgttacctgcgatgcaataaccgaaaaattgggaaaattggcctagagtaatatagaagtgaagcgcctctttttgaacctgtctagggagctaaaataatcgtgaattgagaagtgagagagtaaacaagcctacctgaggctacatagacgatctcacaggccagtcccgtgactgaccccggacttggacgagccgagggaaaacgagagagccgatcacagacccgacacgctttacttccaagcttgaagtttttccctttataattactgcttatacaactttttgaagatcgaatttgacctattacatctcggcctccccaatggcgaacggaccctctgcgtcgtcgcgctctcacgccccatcctcagcttcccccacaaagttgtgctccaagacatacaagaaagcctcccaactgtatctcacacgacgcttaccagaagcgctcgcaaatatccaaccgattatcacgccttcagtaccagaggaccagcaaacaaatggcgacagctcaacacctattgcgccgattgccacggccgctggcacgtggaggatcaaggtgtggaacctctacatcaccctccttagcgcaatagtcgatctcggtgcagaggagggaaagaagcaatttggtcagaaggagtggaaatcaattgcgtcgcaagtcagagaaggtgcgatttgggaaactgtggtcgaggtcggataccaaggccacgagggttcggtggatcccgaagtggtctacaacctgttagtatcagctcactttcctgcctaaatcgaggtactgacaacgcgatcctagtgctaccctccttctaacccactcctcttcgcaatccctgaaccaacagcgccttgagacctatctctcttcctacggacaacccaacctcgaccttgcaggtcgcctacacgatgcttctgatgattacgagcagcgccctattcgcgcgacaagcggagctgatactccgaaagatctaaatgccagagtaaagattatcgagctctttaccttgcacgtcctcccccgcaatgacgagtgggaatactccaccgaattcatcaatttgagcgaagtcctcgatgaagaacgcaaagaactcttcctccagacactcgagggcctgaaggaagagaaggagcggggtgaaatgcgcgcagtcgaactacagcgagccaaagatgtagagcttgaacggaaacgagaggatgaacgtcgtgaagccgaagaagcagcagcagcagccgctgcgcgagtacagtctaatggaaataagcgcaataccagcgaagtcgactatgggatcgagaaaaaccgcacaaatggttctcccaaaggcaaaggagccagacaaccgacagacaagtcgccaaatggcaagtcacgagctcccgtctcatcatccagctccaaaaatgtcaaaaagcaggacaaggctgaaccccggggtcgcccaactcaggccgtggccactggcgtgcgcaacatcttccgtcacattatccgaactgtgtctgggaatcccatgtcaatagtgcgcatcctacttttcttgatcggaattacgatggcgatgagccggcagggtgtgcgcgatcgcatccgacggattacagacggcgcttggcaaaaggtcaaagctacagccggaatgggagtcaaagtgagctatatctgagatataagccacttcgatctctacgcacattgcatggttattctgtacatttttcttgatcaagttggctctccatcattcttggaggttatttttgcataatgtttcttttgtgattccctttgtgattctctatgtccatgtattctacacatgcataccaccgggtgtggttgaatttacttataagtccgatttcggtttgttttggccagctattttcaaaggtaatcctcgtaaagtgcctaggctcattgtccagtacgtggcccatcaagacagtaagagatcgctgagctttgaatgttgttatgtaacctagctattctgaataggagacttgaacaatcactggaacatccaaagcctcgatgacatcgaagaaaaacaatccaagactcctcaccgtcggaggaatgaaaacaatattatattctaaacgggtatcaaatagtcgtacgctcatgaacacgtcctgcgtgatccccacataaattttcagccataccaatctcaacatcatcgcgcgtagagtcatccaaatcctctttctcgatgactctagcatgccaccaccggaacatctgaacgaagaaatgcgccacgcagatctgctccgtggtatagagtagtaccggcaccgatgtcttcgcttttatgaagagatcaactggctgccacattgcgtagagcaacgggataccaagtgcggtgctcttcgctggtccgcaaaagcaaactgcaatagtttcctccggagacatgcgctcgaatatgggcttggaccagcgtcgagagctgaagattcgcggtggtctggagcagaagaagcatactgccgttaaagtgatgtaaagtaggatgttgaataggaccacgaagattatgctctgcgcggaaaaggtttggagagctcctgttgcgaagcaggaggagaatgtggccctgatatttaagaatgcgggttagaaagaccaaaaaagagggccaaggctttcgtatagaaagctcgttgtactcaccagatcaacaacaataagcagacagtagacaacttaggcagcttggtcttctgcatgacatacgcagtgcgatcaggccaagtccacctcaccacctgcccaacgaacagtggcagtaacacactgagtcccaattgcttgaaaacctccctatacatacttcccaaattcccacccccataccgccagggatcaaactccgccctcttaggtatcaacgcaacagtccaagcagccgtaacaaacgggccgagaatattagccaacaagacctccaccaaagcagccgcatcatctccacccgcagacctcgtcataacaacattggacgcaatcgtcgtcggaatacaagcagtgaagatataccccgccagcaccgcgcgatcaattttactccccgtatcggcagcgatgataatatgcacgatagccagcaccagcgcaggaataaacagaaacgaaaccgcctgcacgatcaagtggagtcgccaattcagcacgtgctcgataagcttctggcgcgggatgctcaatcctgagattaggaagattatcgcgatcacgccgtacatgatgctgtattcggagcggatgatgcctccatgcttggccacgtttgggaagcagtatgccagggcgcacacgacgccgatcccgattaggagccattggcggaggattagacttgcgatgcgcttcagggcttgctgccaccgtggctgtgcgatgtccggggctgcttccattttctttttagtctaggaatgatggcatgggtattgtaccgccgtggatggattttggggtatgtaggggatatgtagggggaaattttcgtgatcggggtaagtccgacccatcggattcgatagcgcgcacaggaatcgcatcatctgaagctatatgttgtactattacaatgtacatggtggtatccatcatggataagtgtatattttgcatctttgtatgttgtatatcaaatctgggaatccaaaacgggttgccgaagtcgggtagccgatgtcatcaatcgggtcgaatggcaccggagacatattcgtaatctgagtcaacatacggaggaactagatcatgctgacactgtcagtttcatatcttgtataattcgttatttggtctgtccgaggtaactagatctcttgtactccatacaacaaagtccgaacaaacgccgtgcaaatgccactataaattcgggaaaacgttcatccgatcaaaatgacgctactatcaacgtcactgccgcaacaccttgcccatatatacattccaacaactgaacccctgactataaacacaaagttcaagcctgcagcaagccccacgttcaacgaaccttggaatactttaattatctgactcagaacgtcccatgaccctttctggggatggacctcggctgaggggagatctcgcgctggtccgagatcacccgccagcggagttcgatacttcgctccgaattgtaagtcccgaaatattcagaatatccccggagtaatgagctccctggagaaattaggcttttctggactgttgtactccgtagtctacgggtagattgtgtataagatgatattatacattgtaactagtcgaacaaggcacgggcgttttctgtactttctctccccctacattgtacgatgtaatctgaatctcaaggtaccgagtataatcacaagccgtcaacgtgataacttggacaagacatgtgaaatctgatcattaaaaatctggggtcattcattccgctgagaagagagccgcccttgttgccgaaggcctcgggattgtcgtgaagcgccctacattttgtgctcggtaccaaataggacataattattatacatatagagatctcccctcggcaagtcctggatctgtcacctcttttttttccctttctttcttctctggtcttctcatctgtgcgtggtcatacttccgttcgtccagcttcctccgcttccccgtcatagctccccacaaagtttggcaccgttgccactcgccttgaatcatataccctggaacttcgccttttctttcctgaaagattaaagatccttgcaattgatatcttgatctttctttcagatataccatctcttccaattgttcggcttatctccggaacggtatacttccgcacttctccacattctcggctttttctcgcgacaatcggaacatctgcgaaacttgattaccgacattgaaggattcctgtgaaatctttgtgaacaaaagtgcaatttctctacagttatactaaaacatatcgaaacaatgtctgccaaaaatgtcaatcagcagaagcgcacatcgcctgcggtcaacttgatcggtatgtagcatagactcactccccctttcggggtcgtgtacggttattgacctatgcccgattagctggtggtggtgccggtatgatggaggctctcgtgtgccatcctctagacacaatcaaggtccgcatgcagctgtcaaggagggccacagcacctggggtgagttacggaatttgccattcgacaatcaaaagccattgctaaccattttcgctggatcaggttaagccacgcgggttcgtggccaccggtgttcaaattgtgcaaaaggagaccgctatgggtctgtacaagggtcttggtgccgtgctgggtggtatcatcccgaagatggccatccgattcacctcatacgaatcatataagggcatgctcgccaataaggagacaggcgccgtgagcagcaaagccactttccttggtatgcgaagcgttgaaaaaaatcgaaaatgcataatggaaagctaacaatccctcatagctggtcttgccgccggtgttaccgaagccgtggccgttgtcaaccctatggaagttatcaaaattcgtctgcaggcccagcaccacagtttggccgatcccctggacgcccccaagtaccgcagcgccccccacgcgctcttcaccgttgtcaaggaagaaggcttcagcgtcctctaccgcggtgtctccctgaccgccctccgacaaggaaccaaccaggccgccaacttcaccgcatacacggaactgaaggctgctctgcagcgctggcaacccgcctacagcgacagccagttgcccgcttaccaaaccaccatgattggtctgatctccggtgccgtcggacccttctccaacgctcccatcgacaccatcaagacccgtctccagaagacccgtgctgagcccggtcagtccgctgtctcccgtatcatggtcatcgccaaggatatgtggaagactgagggttaccgcgctttctacaagggtatcacccctcgtgtcatgcgtgttgctcccggccaggctgttactttcaccgtctatgagtacctcaagggtaagctcgagggctctaactggtctttcgttggtggtagctttgatgagtaaatgtgccaaaatgtcttgttgttttctggaaagcattgtgatacctgacttggcatggtgggagttgcattccctgtttcgcgcattggactctggaacagaactgttcattgcaagccgcttgaaacggctctttgtgtaaatattttgtgctttgcgttagttcttttctataccactttggtgcgccttgagctgaaatagagaatatccaaaaccattgaagagtcgtttgccagtgtagtaatttggtgttgagggtctgtccatgaatgacccggttgtagatacaccagtcagcaatgcttgtgtaacaaccacacaagaacatattcctatcgagttaaaataacacaagttttttctcctttctgtattatagactcgttggatgtcgaaataaagcccaactgggcagccctgacggctgacaacgcgctatcggcccctcattattcaccgcttctcccctcataaataacaaccaaccaaccgagctgcatcctacagtgcagcatcatgcagtcaggaattacaggtgagacattcgaattatttgatcttgaactctgaaaaacccccattgaattcaacactaacaaacatctagtctccgcggagctgaaagatgcattcgcccgcttcaactccgacccctcaacattctgtctgcctgcaactattacagcagagaccctaacgccgctggccccaatctccttccaaggaagcccatcggaaaatgccttcttttcagccctcccccagctgtcctccgtcctccagcctaagacccccatctacctccttctccggcgcccatcgaccgccgcctctaccgctccactcatcgctttgacctatatcccgtataatgcacccgtgcgagcaaagacgctctttgcttctactcgctcgacgctgacccgcgagttgggcacggagaagtttgcttctaccgtctttgctaccgaggaagacgagattctgggccaggatgcgtggcgcgagcgtgatggcgagggccccaatgctatctctcgtgaagatatgatgggcgagaaggagagggagctggatgctgttcgtaaggcggaggccgaggcacggaatggcacccccgggagagatattggcattggtggcacctttggacctgcctctggctctgggatgagggtttctctgccggttcacgaggaagctaagtctgcgctgagggatctacgccatggtgggttggtacaactggtaagttataccctgcctcgtccggatctgtgaaatttgaggctaacttcaagcagactgttgatatccccacggagaagatcgtcttggcccactctcactctgacgtcgaggcacactctgtcgccacacatatctcctcctcttcgccgcgttattctttctatcattaccccgggtccgatgtcgtgatcttcgtgtacacgtgtcccactggatcttcgatcaaggagcgtatgctgcacgctagctcgcggagaaacgccatcgcggttgctgagcaggaaggactcaagatcgagaaaaaggtatgcgtgccccgttgtggatggtcgtttcggatgctcacaaatagcagattgaggcctctcaccctgacgagatcaccggtgatcgtttgcaagaggaagtcactccatcacgagaccagggtcctgcgcgaggatttgcgagaccccgtcgccccggccggtaaatcgctattgtatagataggctatattcttgatgagaccagagagcctccgatccgatagttgtagtaaatatagcagtactgtgcttgactcgccaggttattgtctgaaactttggtagattcttgttctaccagcaaaggtagaattggatcaatggttagacattgatcggatcctcatataccccttgaagcgtacaattctcacagataacctgttcatatttgatgtttcctggatatctgtagccgtggccagttttccaaggcgtctaatatgatcctcttagttattcttggtgtaggttgtatgagcaacagaaagaatcactcgaggtcaccaagtgctggacacatgactggtgatttcctaattgatttgatgagctcgacctggaggtataaaagggctccctccccccaaatcttcctcttctcttcttctctcctccacatccctctgaacaccatctctccgtagccccatgagatagggtcagcagagggtcccgtagcacatgctgcctaacccaccacagggacatcaacatcatcatgttgtggaagtccatgtaggtcagcaacaaatatcaaaccgggctttctcgtggatgttcctgaagttgtggctcacattgccacttgacgagtcccacggaatacatgaagggtgtaaatctccgtagccgaagacttgtaggtagtcaccctggcagaggtagtcacatcactagagagaataattgattgctattatactgatgtccttgccatgttgaagtagtttgggatgaagcatacgtggatatttgttatcatattgccttagacaatcctactgagctctaggacgaatctcacgtacacatatcaaatcaagaacgaaaactcccgggtatttgtcagtgtcggcctaaagaaacataacttggcatgaaaaggtcgactatggtcgactataaactaataaatcacagtgtcctcgttatcctcaacgacctcgcctccgtcatcatctcggtgggcatcatgctgatcttgaacggcactttcctccacgttggcagtgacttcgtctgttttggctggatcggaggtttggcctttggtgtctacaccgaccgtatctggagcaccttgagctgtttccttagactttgaatctgtcggatctgcctcgtgctctggaaccgatggctggtcttgatgaccacctgtttgctgctgctcttctgacaattggggcttttcttcgcttgcaggttgttgtgtttcagcctgagttggttgtgtctcagcctgagttggttgtgtctcaaccagcattggctgttcgggcacaaatgcctctggtggatatcgggcttcaaactcggcgacttctcgggcaatagttgcctctgcttcttcgatttgttgttttaccgttgaatcgtcgccaggtcggggttgccatggtttgtaatactaaaatgaattagctgatggctactataatatgaacagcataactcaccagagccggctctgcctgtgtcttgaagaaatgtgccatagcaagcatattcgaatgccgtgtttgcatctgagaatgagaagagtcagtaaaaacttaatcaccatatacctcattggtatgtaagtggatagatcatgaacataccgcttctcgctcatacagcggagtttctcttctgcgaatctcatcccgctgttcctttcgccgtttcttcaattcaccgaactcggcatcctgtgatttcaacttctcttgctgctttttttcaatgtcagcgcgacgtctctgtgccgcggaacttgagctctgcgatagagtaccaagcagccccccgaataaccgctgaccccgcttgcgatcctcatctcgacctgtgcgcagtcgcgtaggctttttctccacagactcatctgtcgcaggtggaggggatgacggccggtgccgctgagaatgcggggaggtgttgtctgtagagctgagtcgtcggcgcttagtgtcgtattctgcagttgaagactttcgtcgcttggctgtcaactccggagactggatagtatcctggttgggaacggccactgcagaagcgagtgtctctgggctgtcaaagtaatatgcgcgttagctagagcgctccaattacaatgcgcgcgcgtgggttgtacggggtgatgaaagctacatacccttcagacatggtgatcggcaaacaacgctggttgtaagaaagaaacaaactggtggaagaaatgagcgacgttaagtgctccgatccgggtcaggtattggagttgttcaagaggcgcaaaataacgagacatgttgcatagaatcacattacttggagtcacgtgcacctaccatttagttggggcgttcaccgtcggcttttctttttctcctcttacttcccagcgagtgccaaatcatacttcattccactttctacagctttaatattctcattttcctgttacgccactcaaatcataatgtctcgtcaccaccccgatctcgtcatgtgccgcaagcaacccggcatctctatcggccgtctgtgtgacaaatgcgacggaaaatgtcccgtctgcgattcctacgtgcgccccacgactctcgtccgcatttgcgacgagtgctctttcggaaactaccagaacaagtgtgtggtctgcggtggcgagggcatcagtgatgcgttctactgctttgaatgtacgcgtctcgagaaggatcgcgatggatgccccaagatcatcaatctgggaagttcgaggacggatctgttctaccaaaagaaaagtttcaggaatcaatgatcttcaagagaggcttgtggcttggtgtccaagtggaggggagccaagcatgagtccggcgggtttacaatgttcagcctaacgacaaaatgactacaagctttacaactgcgagcacgtgaaaaacatcctgtcggtggactattcaaacctgctccgcgaatgaaggatatcaacgaacattcggacccgaatacaattcaacgaaatatccctgtgcctcggactgcttttgcagcatcatgcaacaatacccgacaagctggcaggcatggtggtaacgcgcgctgtactatcaaacctcgaggattcgcaatcaatacagacgatttggcgactaggaccagcggggctctaggtggagcagctggactggaagcaacacctgcagggttcgtgactgatatgtctcggtctcggtcatgtttcgtcgattatccagatgggtatggcatgatccaacccccaaatatgtggcttcaaggcggtcttcataaacattatgatgggtgggctttgattgagggtccctatctccaattccaattctgaataaagccatttcccatgcatataaactttgccactgtgataacttccgtctgctgttatgtaataatatcttcgacttttgtcaaacttgatccattctccgtctccgtggccacccatcctttcttgaacacctatgatcttatcaggcgtccttccttacaatgacaatcgtctatttcgatatttggaaagtactggccgcctagaatagacgaagaaaatgtaatttgcaacaactccacttgcacagaaacatctgtcggcgtctgtatgttggactgtttgtaactgggaaccactttcatcagtcgttcgagcattaagatgtcagtctcaagtccagccactttcggaatctcctagcgacctacctagtccgttacatttttgcatctcttcatcgtctaactttgagtgctggcagcaatggtgcgtatattcggattagagatattggcaagctgggtcgtttcctacgaagcagcgcctctcgaggaaggcatgaatctttcctcacccgagcccaatgcaaatcgatattgctgtgctagccgtacgtctaagaatgaacctccaatatatctgtgcactatgtactccgtgcatacaacatagaaggatgtagggtttatagagtgtcttggcgccccactaattgtttccaacgtgccgaggcacacctaagaggggtatgtcatctctccggcatgagatcctctccgggctagtttcatgcatgattatatatcttttattactctgacgccggttttccttttgatctgtatcggtctcaagttgtatagatgtatttatcgacttcacctgatatgtggggttgcacagctacgggattaaatcccgcatctagtgcgggtgatccgcatgacatatggtattattacagatagtttcaattaaaacagcaaattcaattaattgaaagtgaatgggtttttattctactgtatttttggtattagtattacactgtggaccctcggggcctgatcccgggttgtactttaacgcttggactctaaatagcccagacggtggccacgaatctgttctccccacataaacatccctttcccttactgaactgaagacataactatcattgcctgtatcaattcgccatgccagttgacaagatcggagtatcgggtgactcccgtattgagtataagaccgccacactcaacggccataactactgtgagcatagcatactttggagaagtctttctccagaataaatccgaactgacgatttgcagcttaccttctcagccagcctaaatcaggggaatacgaaagcactgtttttctggtaagcggctagctcaatcataaagccacacacgttgacatatcttcatagatccatggcttccccgatctctccatcggatggcgatatcagattcccatgatcgtagacatgggtttccgggtagtagctcccgactgcctcggatacggacgaacagtgagtccttctaccctaagatgggaatgaattatcatctaacaatccaacaaggacgccccagacgaaatcgccccgtattcccacaaaagctgcgcagcagacatcaaagccctagcaacccatctaggcgaaacccaaatcatcctaggtggacatgactggcaagcaacactgggcaaactccttttcccagaaccacaaagctaatacacaaagcaggggcgcagtactcgcttaccgcgttgtcctctggtacccggagctagtaaaacatatattcacagtcagcgtgccttattcaccacccatgaccaagaatatctctatcgaatacatggtccggaacttgtcaccgcacttcgcgtaccagctacagttcaagagcgagaaagtggagaaggctattcggtctaaggctgagattcgccagtttctgattgcgctctatgggggtcgtacgcaggagggcgaggtggggttcgatgccaataacggtgttttgtttgacaaaattggccagttgaagccgtcgaggttgttgagcgaggaggtaagcgggcttagttgattttggttcggggttggggtttttatgttgactttctttctctaggagttggatttttacacggatgaatttgctcgcaatgggcttcatggaccacgtatggtctcttctgggttcgttcgtcggacgcttgctaattatctcaatagttaattattaccgcactggtgacttggactatgacgatgaacttcctattctcgagcgcggggtccaaattcctaccctgtttatccaagcgctgagagacgaggctctgccgccttatttgggtaaatctatggggcagcaggtcccacggctgaccctggagcaggttgatacttcgcactgggctctgtgggagaagcccgaggaagtcaatgagattattaggtcttggttgaatcaacaatattttgctgatggaaggtctggcaagctctgattgaaggaacgataggtatagtggcacagtgaaaaaacaggattgattgattattgtgaaaatacgtatttcatatcggaaaagtaaaaagaacatgcgcttcataacaagtcgagccagcatagatgcacaaactgggactcaccccgtaacgatcaaactatttagtactggagaaccttagtatcaattatgcagccgaccctctctaagcggtccacgtagtcctgacccagcgtagcgggagtaacaatgccaccgcgcgagacctttttgatcttctcctcctcgttaagaataaccatagcagcctcagccagcaacagtccagtaaaggggtacatggcgccgtggtaagtgatcttaccgaagacgcgctgtaccggagcactctccgcagtagcgatggcatggtactcgagaaggtcatttgtcgagtcctctctgcgcggaccactgccaggggcaaagacgaacttcttcaccagccagcgcaccggcgacagcgcaagcagcgaaagtgcaaccaggaagccgatgtgaatggcgacgccaaccagcgcgttacggaccgacaggaactgacggaagacgaattgctgcccgtacagctctggcatcaagctgctgctgcgttgcacgatggtgatgtcgcagataccggacggggaggtcgtcacggtacccaggtcgcgaattgaacgcacgccgaagatcttttccaggattgagtcgcgagggatgtttttcggtggcggggatgctgccaatgagaagggagtcattgacttggatagctcggacattgaaaagccctcgaagatggttagaatagtatttatggtgccgccgctaggaccggaggatctgttgtgaatggattagaaatgggtttctttgtggatatgaaattgcatacctcatctctttgatggtgctgtcaatctggcgggttgaagacgcgaggtcctctcggactcgcttaaccagagaccatgccaacagatcagcaggggcactctcgacaccgttacaagggatcatctgttcgcaattagcatgaatgtatcttataggaattgggtgcagaacgaacaatagcgccattagccttggcggtctcgtggtacttctcgatgatcgacttgatccagggtgtttctccagaactgtaacgatcagcaagtgtttgaatcagatatgaagcaaaactcacacatccacatagtgagttccattgacagcgcatgcctccacaactggggtcgagtacaagtggtatggacccacacagttgataaccagccgcgttttcagggctagctcgttgagctcgatagagtttagttgaacgaccaggacatctatgatgaccccagggtgagcattgagatataagagctatagaaaaatgggaccgtaaggttatgtacctgcgtccacgcggtctgggttaagacccttgagttcctgggcgatagactccagtttctctgcggatcgacctgcgatagcccatttcagatcggtaggaagatgctgcacaatgtgctctgcgcaaaatcggccagtatagccagttacgcccagcaaaaccaggtcatactgtcggttggaagtcatggtggttgagtcgatgggtttggagtttatgatgtagttgtagaacaagggaggttccggcaaatcacaagctcctcggcacgtttcaaaacgcagtgtggggcgttggaaataggagtagttggaatagtcacgaaagagttcttggggctttacatagaaatagaggcaacttatgtcacacaattgagattctaccttgaccagggaaccgcagatgtttatatttcatggcatggaagaatcacgtgatcggatagatcaattagcccgagaaaaggagaccgggggggccggtggtttcgaacggaatcaggccggattgggatggttttgatactatacaaatctattattgtacagggtcatcttgaatgatgttagagggaaagagggaaattatacatacatcagacacctgaaatagaaggcatcaagtgaaaatcaaagttttcaatatcaagtatcaaatcaaacagattcttggaaattctaccaaaatcaaccaggtcacatccaccaacatcgtcatcgcctcatctggtggaccttgtggaccgaaacacaccaagtaagcattggaaacctgaggccatcaacttgctgatgtaagcccactaactcaaaatggtcaggtgatcacaccaagccaagagccctaagcgagaatccacagcacaacccgccctcattcaaagcgtcctttttcggtctcctgttgaatacccatcttcatcctctccaccagccaagatgacgaagcgcaccaagagtatgtgcctctttctcaaattcaacacaccgcaaaacgaattgctcaatgctaactattttctacagaggtcggcatcaccggtaaatatggtaccaggtatgacatttgtctagttcgcgcccacacgactgtgatttcctcgatcgagacacacgacccttagcgaatactcctatacgacgatcaggattctaacaatatcccaacagatacggtgcctccctgcgtaagcaggtgaagaagatggaagtcacccagcacgcccgctacgtctgcacattctgcggaaagaacaccgtcaagcgcaaggctgtcggtatctgggagtgcaagggctgcgacaagacagttgccggcggtgcttacgtcgtctcgtaagtcgcccgctattgcatggagcgacactgtgatgcgacctgggcattgacctgggcttgcgcacacaatcgcgatccacaatgtaccaaaagaggaaagattgctgacagttctgttttatctagcacccccgctgccgctgccacccgctccaccatccgtcgtctgcgtgagatcgctgaggtctaaatgggaggattatgtggtttcatttctctttacggttacccaaaaatgaatgaaaaaattcgggaatacaattcttgttgcaatccgcttcggccccgagtataccgtatatcgatgtgactggttttcaaagttcgtctcggtcgctgcctacatgatagacaatccaccgcaatccagatcctccacctgattaccttcgacgttctgcgaccgcgtgagtcatatggatggactgcatatttgcggccttttgtggtttcgcgacgctggacagtcacgtagactcgacacaacatcggtggtcttggtttggaggtcacctggtcttagcgtattgtctgggtgcttggaccgactgcgctccggactatatctttcgtactttctacgtgcacctgaacatttgcaccaggtgcctagcatactccggcccacatgatatatcctactggtacgatccggtcgcatgttaacccagggctccgggcaaatcgatcttgcccgacgaccaaggtgaaaactgtccaggctgcccagtgattcaggtttcagccaaatcatgggcgcctaatgtagtcatttttaatttgtagatcgacggccaccttacactcgggactctgtgtgtattttgtgttgtacagggaccttgttggatggttgcaggatgtccatgaccagatcagatactcaagcataattagtagccataaaacaccaagtccaatagagaattcccaaaatttcaaatgtagtcatggtaataccaagatcgcagatagtccaaacccgccaatccagggcatcgtacatcattcgcctccgtcacgttcctgctttgcgttagtccggtaatccggcccaccttcaaaaggcgctccccacacctttctcgcttctacacttctcgagagtcgctcttcatggacttcgccttctctaataaatctgtttctcatgtccgatacctgtattgtttgtttaggagaccttggtgaaggagcgggtgatcctcttgagcctgtgagccttgatttgaaggatggcgacctcaatgggctcgactctcagatcgctcagctacttccctgtggtcatgtcctacataataattgcttaaaaccatgggttgaacgagcaaacagttgtccaatatgtcggcgaagtttcaatatggtggagttgagcgatagtgtcggaggtatgacgctgccccttccttgatttttgtgacttataacatggtggttacaagtactgactatattgatttgttataggaactgttacttcatcctacgctgttcaggaccgaactcaagtggccgaagttgacccttctatgattattgaatatgtggaggatgacttgatcgatttccaaccatgtacaatttgcggacaagccgataacgaggatgttctccttttgtgcgacggatgtgatgggccttctcatatatactgcttaggtttgaccgagatcccctcagggtcatggtactgccaacaatgtgaggagctacgtgctcagggacctgctcccgaggtatcagcacggccgtcgcgggcgatcgagcagcggagtcggcgaactagggcccagcagagacgactacagaatcggactcagacgaattctctacactgggcacgagtctggcaatctgtctgggatcatctgaatctcgatcttgatttccctttcgatgacgatcgatctgccgaacgcgcgctgcaacaacgtcgtcgcgaggaggccaaccagcgcgaatttcaagcctggcaacgccgctttgaagtcgctgagcgacaaggtggtggcagtcggtttcgcgatacagcatccctgttcgatcttgaccatgcccgaccatcccgacctcgggttcctcgagttccgacaccagagcccgagtcgctggaggagatgcgggcttggaacgccttcgagagggcgcgggagatcgaaaacaacccgagtgcagccaggaagcgcaaagagccaaccatgtcgccgtcccccgagcccacagaacccgagcgcaagttgaagcgtcctcgaacgaggaggccacaggagctcgcggctcgcgcacagcaaactcaaaatggggaatcatccagagctgggagctccattgtacgaccgagcagtgataattccaccgggccaagcttcctatcgtcgctattgaaggaagtcgaagacgcaccgaatcattcatatggaccttcagcttcgacatctgtcggtcctaccgaccatccatctcctggtttatcttctccctccatctctcccgcctcatctcgttactcctcccctgtcctctcggctacaccaccacctttctcgcgaagccgccccatctccccttttcaactatcatcccccgcccaaccctcatctcctcctttctcgcccgaagtgtccctatcgggtagtccgtcgtcaaatggtgccaaagaagacaaaccacaacggcaagccgatcgtcctcgctcccgcatcccccaacgagcactgtgtttcggggcatcccgctcacctgactcatctcccactcgagctggtccatccctggccctcaaagccgatatccagaaaatggtgggcactgggttaaaacctcactacaagaaaaagaccatctcgaaagagcaatatacgaacatcaaccgatctatctctcgcatgctctacgagcgggtcggggacaaggaaacgcttgagccagatgaacgcaccaacctcgaaacagaggccaaacacgaagtgcagaatacaattgacgcactggtggtgaagagcaaagagaaacagaaacagcgtatggtggcgaccgacacaaacggtgatctataatgactataccacgaactctccccggcatttaatggcgtttcttctcatctcagcgaatcatactccccggcggaacggattggaatgtataactggcgtttgatccttgccggctgtcttcttattattcttcttgtccttcttcttcttccctcccccttttgcggggcatctctgtgagaactattttttgttcgtcacctccttcgacgagagtgattatttctttttttgtggagctagtctattcgcgttctctttgccccatattttgtctaaatattatttaccttcaaccgtaggacgaggtacggccaccttaggtagcctcgccatctttggtttattgggtttttttatctcctagtcggggcttgcatgcatacttgtaaagataatctctgatgcataatttatagggacagtgacgactcctgactcaatcggggatcgatttggctgcacgtctatggataattctaaaaagtacatatagtaagtacaaaggaggttgtggtatgggagataaagctgattttgaacagtgatgccacagtctgacatacgaaatatcccagaattgaggattcgatcagaattgacagccgtcctattgaccacatcgtcctggtagtcgacgcaatttcatttcaaaaccgatagataagtatagtggcaccggtagcgaaagaggtcatagcaataaatccagacaattcttcgaatatagttggtcgttggaaagacaaactaacgagcagttgaccaaaccaaaaagtgagagtcccagccagtgctagccactgcccaaccaatgcaccaattttgggggcccatacagctctctgacaatctgttcgaccccaagatcctcaattcctgcctgctggcagaactgggtcctggacctgcggtgggaagaagacggttgggggtgcataattgggaagtttatggttgtggactgagcaggtcgaacgcaggcagctgagataaccaggtgcatgcatacgagcccactcagccactggggtactctcggttagggggagtgagttgctgtgaaatatataggaacatgtgcttccgaagagggaaggtgggtcttcacacgttgatgcctgaatagtataacgtttctgcctgcagatcatagacacttagtaactatgtagtacttggttagtattataatgtacatatatttctctacgacaatacaagaaaaaagacaaaagcagcagttagtcggttaaaaatgaaaaaaaggacaaaattcattgttaactataggaaaactgatctgcttcaccataggacttccatcctagcccagataaaaagggaccatagatcacattggacacccatccacagttctaccctctgtgttttcaccttgtcaatccatacttcctgcactttctggttcgcagtcatagagtctggggtaaatgtggagatattgccgtagtagggatagaccttgccaggaacaatgccgttgatcacgacaaagcccagctcctcgtcgataaccaggttgactcgtgcgctcgggtcattaggtctagtgttgtcccaactagttgatcaacttggctccgatcgcttatcttttctcatgggtcgtcctaggctggcgctccggcagacccagcaaaacgacagaagttctgtaagtttcctccatgtagctcaatcagaaactggcaattcttgcatggattggcaactgcattccaaaaacggccgctgagggtgtgtttataccgcggtgccctcagcgctttctttcttagagcgaggccgtgaacatttccattggtcgtattaagtccgctgtttatggtgatatgtcaatatagctcattgccgcgagaaaaataacctaccgcaagagatgaactataggatacgtttccgcgcaattgccgatggtttggtatagttcgggcctcttgctgaaggaccatccagacagtgtaatatgctcaccacccacaagccagtatctagctcgcttaacgggtaatcgccaagacccaacaaggcggtctttgtgaacgcacccaccaagcgaagcaccgagaaagaatttattcaacagacctaataataggtccaaagaagtattgttgtcagacgtctcttgtctggagttgctgggattggcgcaatctggtgatatcggggtagcgtagtctaatcgactaagagtcgaaaattctatgcctagctctcttccagagtttgtttgtctcaaggaagacagcctggtcatatgttgtcaacaaggcatgcttgagctgcatggagtcttatatgtgtcgtgcaagctggcctatatcgggttagagtcttgaaccttaggctggagaaaaattcttactgatttctcgacgaaagctccggtcatttgcctttgcgggctcccttctcagccagacagatcatgtgccaatgctcagtccttttgacctcgctcacgattttcgcgtttagatcctgccggggtaatcgaccgatgcaatcagtcccatatcgcgtaccacatccctccatacttgaactgcgccgcgtgaagctacctcatgagccccagtcaagtgctatgatcatgcaccgagtgtcgtaattggacatctatcgagtagagctcgatgaaaacttttgcacgtgttagaaagggaagttctcaatggcggcagctttgacgtcgttccttcctatcctgcagagcgccaagtgagttggtcaagggtttgcaggatttgtagggaccactgaagacccataatggggaggaaaatgatccggcaagaacggtaagaccgttttgctctcaccacctcgataggaagttcctcttattttttatgatcctccggatagctctggtcgactacccgataagcttggatgtatcatgattccagataatggtagctccggcagcctaactctgcatttagaatctgcgaaacctaaatccaactgtttcgtgttgaacacggcactcaaaacctcaccaacacattcttgggctgctcatcaacagctatcatgtgctcgaatgtcattgaggtgggctgcaaccctgaagagacagttatgatgggttgcatgttatgctccttatcgctcgggtgcttgagatggttctcgtcatacttggcaacagtcatgaagagctgatatcgatcttgggatatatgaaagcgcctatatgatgtcagtagtattcgtagttgaccaaggtggctaggggcgaagggaaccaacatattcaatcctagggatggcactgtttgccatgtgtgaggacccgtcattgattggaggaggcatttctcataggagttctgagaatgagattggatttgccattttccagagacattttccagagatggctacacaaggatggcctcgatcagggagaaagactgggtagcattccaaaggtaatggtgaagtggatggggagagagacagcggtggggggaggatctatttatatagcaatatatagcaaacaataccccgtatgtagtgccttcccgatctgactataagaatagccgtcttaccgcccccatacctgttccaggtatgggtctgtcccacataacagaagattgccacataacggaagttttgggattttaggtatcttttatatggtatacccacacaaaaggtacataaatataaaatatacataatagagattttgtcacttctatatataagatatccgagattttttttattagccaatcaattcaactataaatttattcttgattcatactcttatttctcctttaactagccaaagggttgagtacataatatggggtatatgtaccttttatatgagtggctacccgtggacgtagtaattgaccacctaataactagacagaaataggagagtgagtcgccccctctaataatatgctcctttgatttaatatctttgagctgcttaaggatcttaggatcttatgttaaggggatagggttagagtacagagtactagatgattgctttttttttttctgccggctggatctattctgccgtttctcagcgattactctttcaccgactggatttctatttttttcgacccagtagagagcgcctagtcacatgatctcctttcgaggcgttccctccgggtgcccttccggggcatcccttcccagggggaaagggttattttttatagttgcttcgcttcgctccgcaataaagtatagaggtagtgaagccctttgaagaacctatgctatgatatcattggttaaataaaagtggatatagttctcaataggtgggggaggcggggatggtgcacgtgcccttctctgcacaaagctctgacatatgtacaacgctgtgccaacagtggttacccaacttaactactacaactgaactaactacaacttgcaatttacatgattcttcggactttgccagacgactaccttgacagaagtctttttcccacgctgtctgtaatagacttgtgttgacacctgggtcatgtagcccgagttgctctctgattcttcaagctaaatactgcttgtcagtttgttgaatttggatttatgatggttatcacaagttatacatggaataaagtcatcctgaggttccaaatgcaaaatcgctaatatgatctctggccaactggacatccaaaatatcaagtcctacatcactaggctatataagcattcttgcggtgatgaatggagagacacgaaagaaaagaatcaagtgatctaaagtcttaattttaggcattgacacttgcactcttcgtcattccaattcccacagcagctgttgtccctgcgtcaacaggcagaataacaccagtcatccaccgagcatgaggtccagcaaggaatacaacagctccagcacagtcccatccatttccttcggttcccaataagcttcgtttccgacgggcctcacgcgcctcttcgctcatgcccttcccatacatcataggcgtgtacagcatctagtatcatcagcttcagttccatacaacaaacatgttaaacatactcctggacagacacaatttacacggatcccatcgagagagtgatgagccgccatagcacgggtcatgttgactacagcacccttggcagtcgggtatagcagatgaggtgtgccacccttcaacccagcaacacttcccatgttcacaatgctccctttgatctcgccatcatttcgactcatctcaggaatggcatacttgaccatttgtaccatgctggcaacattgatctccatactcttagcccactgcatcatatcaacttccaccgcagtgcccgccgcgcctccaatgccgacattgttgattaaaatatccagtcgtccaaactgttcaactgcaaagcgcaccgcttcttggcagtcttcttcggatgtgacatctccccgaatcgcaagcgctcgtccacgaccgggtttcgagttcacgatctccacggtcttgttcgcccactctaggttgaggtcgacgcagattacgtcgcagccatcgtcggcaagaaggattgaaatcgcgcgtccgtttccaattccatcacctaggcagcctgcgcctgttactatggcgactttgccaactaaagaacgcgatgggggttccgatggaatgccagactccatggttttcgatttgatttggtttcaattgagattaccagttaactataactaagtaaacagatgcggatacagtctaccttatacccttatacttgctgcgtcttttctctttcgcgatatgtctacatattccatcctcatgcggggttaccaaatgccgatatacgctgttaccggtagccgagccgaggtgatgtggggggtaaggtgatggcgctattgtctctcagtgaaatgtatgggactacatttgtacatgaattgactacccctccatgatgcccctctctgagtggctctgtcttttgacttggcggggtttactaaacccccatagatgatcagcttcttgcttatctcttatttccctcccttcttctttggatattattacctttgaccactacaagaatggccgacttcactgaatatggtaggccgagtgccgaatggatcgacctcgagccgacgctgcctaagcttcccacggacctttcggcggaacaactgaaggcattgctaaataagggccgcgagacatccgcagcccaagatatgatcaacatcggtgccgcagtccagctgcacgactacacaatcacagcccgcgacggcgcgacgctcgaagcacgcacctaccgtcccgccggcgtcccaatttccgagcgcctgcctgtttacgtccatcttcacggtggaggttttcttttcgggacactttcttctgaagatgccatttgctcgcggattgtcacctcacgtgtccagaagggtaccccagtcatggtcttgaacatcaattaccgacacactcccgaatatcaatatcccactgcttgggacgatgtcgaagacgcatttgtctggctacacgagaacattgccgagattggcgggatcggcgagcaggttgtcgtgggcggtatctcagctggtgcatggttgacggcgtcgttggcgctggctcagctgcgcggcgatgataaacgcttagcagcctgcccaaaaattgcaggtcaggtcctcatgattccttgtcttgtgcatggggaccactatgcgccgagactggagttgctcaagagtcctgatttgtcgagctatgtgcaatgtgccgaagcgcctgtcttgccggtgactcgaatgagattgttcaccgatcttcttgggattagcgaggccaaggatgctgctgcagatcgtcggatgagtcctggtaatgctaccgcggaagaggtcaaggacttgcctcctactacatttggaatcgcgggaaatgacccattgagagatgagggtctgttctacggacagcatctcgctgaaaacgggtgagtttgcgtcttgaagatttaggtgttcaaaagctaaatatttcattagtattcctaccaatgtgcatgtcttccccggcgtcccccatggatttaggaggtacaagcagctacccgatagcgagaggtgggacgaggttatgagtgacgggattgcctgggcattgacaagtcctttacctggtccatttgagatcaagtccaaataggacactaagttgaaggcggaggatgcatacatcattttgtatctgttagggatatcaacaacatagtcgtagttaccctgctagcgcagccgaatcaagtgtatgtttagcgctagacgagtatagtattaatccaaggaaatcatcagattaaataaagcagacatcaatagaagaataaaggactcgaagaataaaaccaaggcgattcaccgctcggacccacactgccgattgtccgatctggtagccgccaatgcgagtcttcctattgatttactctcctattttttattttctattcaacttcaattgtctgctcattatgcatgtctattgtgcactacatgcaatgtaattctaatccgctttcaatcccgcattgaaataaagggcgggcccctctccgacaaccatcgcttttgcgcaaagcattgcctcatttcttgtgcgcaattcggaactagagctttctgtcctaaaagctcgtatcgtgtcattctctcgtgctcaagcgttgtcccgcgaaacccgaaacccactcatcacaatgcctccttccgcctccaccaacggagcctcctccacccccgacgccctcgaatccgacctcctcgtcaagctgtccgccagctgcgcactcgaagatctgcaggaaaatctcctcggctcgctccatcgcctgggttggaccgacaaggtcaccaccctcgccacagaactcctccgcgccggccgctgtgagaccttcgacgatgtgatggcggcagtgctcgcttcagcagagggccgaacccaccccgcactaggggcccaggtcgcgaacggtgaaactacaaacggaacaaaagagaccaacggtgtcaggaaaggcaacaaagccaaaaatcactcatacgaccctctgaagtacattgaagaaatcgatatccgcattccggaaacggtggtcgacgagggtgtccgtggattgaaggatatcatacgagaagtggccgacttggagggagagagtgcgcccaacggcgacaagaaataatgacagacaccgggcgctgggaagcagcatttgaaaatgcgatcatgcatggcgggtttctttctaaggagtacagattgtttcggtctggctgcatcaaattccattggtttacatacgaagtctacgggcgctcttacatttgaatagactaccaattcacactggggttttgaatatccccctttttcaaagcactgcattttcccttgaagctttggctcttctaactatagctcttgatgacgcagtaggtactccaggccccacaaagtctactcgattgtctttaatccccgcaaatcgaatgttaccgtgaaaaagtatgatcctggcatggattatttctcatcggcttactttttcggatagccgaatcaagccctgcggttgagacgggagacgctcggcaaaggccacggattattagcccgaggctcggagagggacgtaaaattgactagtacatacttagtttttcggaaattgatatactgcagttctcattcaaatgcggcgattgctaatactcttaacaaaagttgtggtattgtcataaccaacgccgacatcagccatgcctctgctgacgagctgtggcctttagatggtgagatcataggagtaactcttttctgacccgttctattattaccactgtatggttcttgccccgccattgtcttcatcttggtcaaactgtatggatcatagaaggctaatacttgccccgtacaaggcagactggcaatacaccagcagtaaatacgggctgagagctctgatgaggacagcacctcaagaagatgttgcaatatgtcttgaacttgcaaccaatagaacaatcaacgataaacatccaccatcacttggagtataaacctacataaactggtatatccggttacaggccactcactaatagtcacgcctaaacctgttttcaaggagggcttcaaggagggcttcaaggatgttggcatatggaccataccgaggacgggtatctcaagcgcagtcggttcagctagcatcatcggagatcaaagagtgcctggttggagtaaaggacagagggagctgccaagccataatggttcgtaagtgcttggcatcattccaaggtttgatgaaggcgggggtggataacaaattcaattcgatcatcccagagatattgagtttgtagatagtatattccccaaatcaacagaaaacatattccgagtttggaaaaaggaagagatgtagttatactcttcgaggttcaaaagagtccaggcccagtcacgtggaccccgttctcatcagaccagcatcctcttcgcctaatctcgacctttgcgctaagtttgctcccagacgtcagtgaactttttgcttcggagaatagagacgtatcactcgctttaaccggtggccttactttcttccaacgcccctatcccgccgtggtcctgaaccgccaaccttccccgctttcatcttgttgattgccgcgtgtttgcactcgacggcaacacccctcctcggaaaggagttatcgagaacatatttcggccagaacaggagatacccaataaaactcctccctgtcggaagatcttgcgaatccgcccatgtttgacttgaaaccgtcaagtcttgacgtcccctcgttctgcccgcgcgtcaaaagatagagcattcggcgcattaccgccaacactcattttgtttgtctttgctggccctagtaccttggatctggcggtggcgcccgtgaacctcccatatcattcatctctactttcggtgaatattctcttgccatcgaagatctcccgtcatgtctctccatacctcctaccacgccgactccgatgcggacgatgagtacgaacgcagtgtcataacttcacctcaccttcccatcgactcggaatcttctcccacggactccgatattcattcaacagaacacaccccgaccaaatttggacatccgatcgatggtcctcgttcaccgcgaacactcatcacggaatggggagttgatgaatgcaatgaatttttaacatcacttggattgctgcagtatcacggaatatttcgaggtgagcagattccttcaagtatggttaggcagcgctatttactaaccataatctctgacgcagagaatgggattgtcggtgaagccctggttgccctgaagcatgatgagctgaaggaaatgggcatcaacagtgtaggacatcgactgacgattttgaaaagcgtgtatgaaatcaaagtcaagcaagatgttcctctcgatgcagaccattatatcccacttagtatgttcccagacgtcctgatttaaccccacttctaacccgtgcttgcagcggcggaccagagtatgaatgaaactgctacacaagaggatctcgcgcgtttaatcaaatcgatccaagttcgagacgaaaaactcatgctggttgaaacagagttgcgccggatcacagacgattaccgacgattgcgcgaagaaattctaccagtgatcaagatggtaaaagatcggtcacatccattacctccacccacttcgcatggacaatcagaaaactggcacgacagctcggccactctcacgtcaactccccaacccactatcacccaggaatcttcatcatctaaaattgcgcgggctttctccaagcgcatccatcctaacggtaattcatccaaaaacaattcgccaactcaccctccacctacgggctatgatggacgcactcatcacgacacccttaatccgtcaggcactgcctcatcccatctcacagccgggtcgcaactatcgcccggaattccttcacctacgtcgcctcaccaccaccacgctcaccctcaaaccctcaatccacgatcatacacccaaccactctccagcgcgaatcgcaacacatcctatgattatgccgaacagacgccgacaatacattctagagaccgatccactccgagtcagcttccagcatcccgcgccgagacaccatctactgcatcacgtcttgacccacgactcgacaggtctgactcacggggtggtggcggcggcggaggtggaggcggcagcgaaaacccaaatagcgtggaaatcttcaaatcatttcgggtctcttgggaagacccatgctacaaggtcctaccggctgctcttaagaaatacaacatcaactctgactggaagaactatgcgctttacattgtttatggagatcaagagcgttgtctggaattgcaggaaaagccccttctcttgttcaagcagctagaaaaggaaggacggaagcccatgttcatgttgcgaaaaatccacatggacaaccctgcaggcactccagggcctgcattagcgcctaatagcgctggcttcgatggtggccgacaaggacaaatcaatcttccaggcggtgtgctctgattcttctcaaggccaaccttcgtctgtcgatgcacgcatgtctgtggcttgagatacccggtgattttcgactgcattctttcttccgttgcatttgatttttatgccactggactatgtcgtgatgttggttttgtcggtgtttggtgggccgggcatgaatttatggatgacactggcgtttctgcttttcttgacgcttcgattccagactcgttgatgtcccatgcagcattatcagccttttctttttatttctttcaggatatccttgaccggcataggactttagtccagtgttttttttttatcatagcatattacataccgagcttgtacatgagattcccattgtttattcacatcatctagttacgggtttcaatcttatgtcagtgttttcaaatgagacagcccatatattacaaatttgtacaaagggaattactttttaagctctaaacaatccacggcagactgcatgtatgagttgttcgcaagctacggagtaggccttgtcaggcctaatgtgctttgctaacacttcaggtgcaattccccgaattcattagcccgtatctcctgtaactccatgttgccctaatcttccaaggccaagagtgctctacccatctgctgccagattattcaaaacatcttacgaatatacccaagagattgtgattataatcagcctaaagcaacattatattcaatatctatactaaatcacataaagtgagcgagaaaaaaaaggtatgtgacgtcctccccacagccagcgcccatagggcatcccgaaagataccctagcgtagctataaaagtgttgtataaagaggaacgcctttctatactctccagggccgggaacggaagaaaacccatgaaggccgaagcccaaggataagcctcagcaagccacaaagtggagccccgtgaagttgatagaaaagaaaaaagaaaaagagcaaagacgcgggcgagccggtcgtatttatgtgtctgtgtttttttttctacgctagagctgattgggcctcggttaaatggttattccggacgtatatattcataaccttggaactaagagatggttaactaacaagcagaaaagaattccctaacaaaaaaattcaaagaagaggtcgtgcccgggatcgaactgggattgctggtatcagaaaccagagtgataaccattacactacacaacctgggttgttgtgtggatctcagtgaaagacctcataagccagggggtccacttccttactgggaagtacgcaaaaatagccctaaaagattcggaacgagaattattagttctacctcaacctctgcaggtagaattgttagagctgtcttagggaactcatactcaatgggtagtctggatctcggtagctttttactattcctttttctattctcaaatcagctacatagttgcctttggagcgtctttcttgttgcggataatcttaagggcattcggcctctttaaatgtggatatgaatatgaacaaataattgcccaatagcgacgtccattgatagtatcacattaagtgatactattttactacttgcagctacacaatatttatgattacggagccattgcgattgaagttaataagtatcaatccgaattccagaatgtggacgactttcctatgcataactagggaaatacctcaaaattctttgtaatatagcttagaaaattagatcgagtagtgtgaagttgattattgtaggttctgaacataaaccttctggcaatccatgatcttcctttcgcggttcttatatagttcattccctgcaacaacatagtgagaaaatagtcgcccaactgtagatatcgtatatagaatcaactttcaaatcgagatccaacaaattcggttgtgtagtgtaatggtcatcactctggtttctgataccagcaatcccggttcgatcccgggcacgacctcttctttttgattttttttttgagaattgctgaggctattttctaatcctttaatatagttatgattagttatgtatggcctacacaacttcttaataacaaagtatctccttttctttttctttttggatttttcatagcccacttatttatatctcatcggattaatctacttgtgtggaacagttcaagctgagttttagtgatctagttcaagacaagtccaagggcaattacatcgtcttagcatcatatatacagaaacgcattagtacaaaagccacgaagaggaaaagccgtataatccagcatcagacctccttcatgccgagtattccacctgctcactctttgcatcagccatttccataacctccgcatcagaatccgcaaatgccttgtcaccgaatgcaacagcaatctcctcgagagaacagtgtgctgtctcgacatagtaaaagtgaactagaatggccgaactgagacagaatcctgcaatcactaggtagaaataaccatgaatgccggcgaaagcgtccggagagaccattccaatgatgaagttaaagacccaattgctagtcgtggccagggccatgcctttactccggccccggagtgggaagatctccgcgggcagaagccacggcatcggaccccaggtgaatccgtagaggatattgtaaagcatgacgaaggcatattggccgttcgctttgacttgaacatccacattaatttcggtgaagacgcagacaatggctagtagtacggccatgccgagacctgttttgatttttagctttcactaatccgatgctcgccttcatggcgatatatatgtgggaactgacctccaagaatgagcagaggctttcggccccatcgatcagccaaccaccaggtaacaactgttgcagcggtgtagggaagagcatttgcagcagtgtacagcagggatttgcgattatcaaagccagcggaggcgagggtgctcggaaggtagaaggagatgatgttgattccgttgatctgcgcgaacatctgcactgtgattccaacaatggttcgtttgcgataccgggtgaacatttcctataaagtgcgatccggtgttagtaatgcacgagattgacaagccacacaagtagtaaagggatcgttaccttccaaccggactttccaagattgtgctcatagataaccgcttcttgaatctcgaggaacgtcttctgaacaacctccgcctccttattaccatcagaatgtaaatctgcaattgtttgcaggctctcgtcaatgaacccattcaaagccaaccatcgaggggtctctggtaggaagaatgacatgacaaacaagacgaaagagaacacaatctggatgatgaaaggcccctgccatgagatatggtgtggcagcaagaagttaaacccaaagtccacccagcaagaaatcatatatccagcgatcaaacaactgtactctatacccaccatcaaacctcggcgatgagaaggagcaatttctgtttggatgataggcacagtcatagagaggaaacccacgcccaatccttggaccgtgcggcctccaacgaacgtggcaaaatcaggggcaaatatttgaatgaacgagctgaagaagtagatgaaagcgccgacacggacacacttctttcggccaatcatgtctccaagacgaccggctatgagtgatcctaccgccgctgctgcttgcaaacacgcaacagatatgccggtgatcgcaggatcgaccgcagtggtcgtcccatcagcacctccatagtctttgaagaagcgagttataaaaacttggttgaccagcagcccggacatgatacctatcaaatcagcagctatatcttgacaacatattcgaggacgccataccagagttataaccgaaaagggcatctcccaagcttccaaaggcacatgttgcatacaataaggatttgcctgtcaacgggtaccgggccgtgatcttcttgggtttgagtttcctctctagccagctctgctgctgctcaacttccgcggcgacagcgagggaacgctctctgagagtcgcaacaggtgccggctcggaggattttgtgatggccatgctgaagatgaatcgaccaacgaggacagcgtatcaaaaccactcgtagatttcatcaagagataagggggcaagggctttatttataccccagaccatatccgcgtggaagaggaattttctccagaatgatggggaaatggatcctggtacactaggtacactatggggtcaccatttcgccgggctaccgaagccatgtgtttttcatggccgggatgagacaatacgggaatacgcggctggctgggcatccctcgtgatcggccgtgaaaaattggccctattattgatcatttagacctagatgtagtcaaattcgagtagtctttgttcaatagtccatcatatgaccgatctcgccgtgaatctgtggggaactaaacggtttcgggactctggcggagccctcgtctcggttccggtggcgaatatcacgcggttccggggaggcttggcatatctcgaagattgtgccggcggaagacgacacggttcctgaagttgcgggattggcatcgggaagatgcgggagataatgactaggataggtgtgagagggcgagaatatatagtcaactaaggcctcaacgaatttggatgaaattgagccgtggatggccaccatttgaaccaatttatgcttcctcggtatcccgtatactagtccggctcggggcttgaacaccgatggagacctcgcctggagctgatcgactatccgccggaaaactttcaatacataggatccgttcgcacatgtaacgtagtgggtaaaatctgcagggcatccataatatttaaagcttagtagaatcccagaaagccctgctcaatcaaaccaaagaaatccgcaaaaatgaccgtcacagaagctgcccaggtagttccaacctagtcgcgacccaaacacatcggtttaatgcacctacttactcgaaaattcatctaggctaccaatgaagcctttgtactgcatcccggaggcacatttgctttcgaggaacgcagcgtacccacaatccagtcagaccgagatgtcatagtccgagtcatggcaacaggtctctgtggttcagatgtaagcgaaccggcttcgacttttccattccatttctcgatgcaacgaaactaacaagaatcctcgtcgcacaggtccactactggcaacatggccgaatcgggccatacgtcgttgaaggccccataatcctaggccacgagtcaacaggaatcgtggtagagaccggaagcggtgctcaaggcttctccgttggagatcgagtcgctctcgagcccggcatagcctgcaacacctgcaatcactgtcgcaacggccgctacaacctctgccggggaatgcgcttcgccgcgacacctccatacgacggaaccctcgctacctactaccgcgtgcctgcagaatgctgcttcaaactcccatctcacatctccatgcgcgacggcaccctgatcgagcctcttagcgtagccgtgcacagctgtcaattggcaggctttatgcaggataaatcagtggttatattcggagctggccctgtcgggttgctctgctgtgctgttgcgcgtgccttcggcgcgtcaacggttatagtcgtggacgttgtcccggctcgcctcgcttccgcgatgaaatatggcgctacgcacacataccaaatgagcatggaggcggcggacaagaatgccgcggatttgctggcaactgccggcttgcatgatggtgttgatgttgctctggatgcgactggcgctgagccttgtctgaactgtggtattattgccctcacacagggcggaacgttcgttcaagtcggcttgggaaaacccaacccatcagttccggttggtctgatctgtgacaaagagattgttttcaagggaagcttccggtacgggcctggcgactttaagttggccgttggattgctcaactcgcgccgagtcaatctggatggtctcgtcactaatgaatacgcattcggccaggctgaggacgctttcaaaaatgtcgccggtcggggtggaattaagagtgtgatctatggcccgaatgtcgaccaggaagaggcgaaagcaacggcatagtgcatgcctttgtgactgttatttttagatagaccgccgattaccctccgactccattccacgtcatatcccataaccaatacaacccaccttcaacgctatcctgagtagtgttttcaacgggttcccgagacagaccaggcatgttccaatcgtattctgctggcagctgccatacttcatgtgcctgtatgcctggctcaacaaattcgcggggttgaaggctatctccaccagtaggaattccggtggagcgatctcctggacccaaagctggaaaatatatttgttagcaagttcatcattttagctacctcggatgaatgataaagctcaccatattggacagatgttaagctattgttcaggcgatcagccctgctgaggtccggcagacgttggtctctagcaaggggattgcgagaatcccatgtcgcatctagcggcattcgaagtgtgtcttcaacagaaattaacgacggatctgccaatgtctgtaaaggctggtgacccattacttggcttgttgcggtgacgggagcaagcatggcagccgattcacgacgtaggagcatgataacaacattcttcagcacagccgtgctttgtttcgatagtgcagaccgtcttcccagcagatcttgcagacgaagaatgcgagtaatcgttcgcttcacttcctgcgcggtatcggaaagaggctccgagagagccatcacagccaaaacaatcgcggcattgaataagttgatggcaagaaatgcgcagaggtggctgtcagtggcgagctgcgctaaagccggcaattctgtcacccttgatgttcttgttgcggcattcatccatagatccggagttgtggtctggttattgggaaatccggagtcgggagataaatttgactgggccacagagggatcggtggccggatgatacatgatattatctgttctgcttccctccggtgtttgctcattcacggtgtagagatgatcaacctgccgtgctaacaaaggtcgatgcagtacaatgagaacattgtcgcaagtcagttgtagcgacagagactgcagggcgtacgccctcaagcttggtgtatcatcggggtcgaagtcacgattaaggtccagagccaaatggctcggtaggcaagatcgccatttttggaggttctcggtgacgtgcctgacaagtgcaaaatacgtgtcaccatttagctgtttggacgtcctcagagtacgtgacccgaagacggtcttgagggcaggcgacgcaatcaagtagagctggtttagctcccgctggtaggttgaatagcatatagggctggcctgaccgagggctggagaaacaaaattcgggttctcgaacacatccgctggcatatcaagattgcaatccttgtcgttgatgcccaatggccggccatatgtaattgatgcgaacctgtcccatgtgtaaatcgtccaccacactctttttctttcctcgatattctcgaaatcccctcgtagaaggccccgatgcattcctaaagactgtgccatctttatagtcgctcctaataaagaaaaggagagatttggacggccatgatagacgtgatgcgatcctaggagaatgcaggtctgggccgaggtgaccgaaggttgatccattaattccaccagatttgactcaaccaaccccaataagtccgcactcaatttcttcatgtcatcgctgttgtcggccgggtcagtgcaattcctctgagatcggtaccacgatgccattccaagcatcacggccaataacacgagaaagggtctttgagaaggatatgcagaaccatccgcgatggaatctaggctctttctgaattttggctcgtaaatggcgagagagaaccagtgtacggcatcaaaataatcttccaacagactgtacacgagctccataggaggaaacggccggctcaagatggaagatattggaatgcgttggcccgtcgccgaatttgccatagaaccaccggtgctggcctggtatccaggtatggcggatgtggtttgttcatcaatgttatggctgccaagttgacagattcttcgagcaattcctatggcggattcagcttcgccgcagttgagagacggaggcatattctcccctccagcggggaagtcagcatcatcgcccctagggtgtgcatctattaatctactttgctcggggattctttcaccgcgaccacgatcattctcatccggtgacttttcggtaagagtcaatggagatagatgagatcgatgtcgctcagttagtgggtttcttttggaacccaggcgcctgacatctgatgtaagtaaaggagagtttagaggatctcggtgtacttacttcggcagagtggccctccgtggtcgggtcgttggaagtggtcggcaatcgacgttggccctgatacacaccgagcaaggtcgaacagggtcacactagtccaggttggattcagtatacgtcctgatcaagtgggatcagggtggctctacccgagatttatggcgccgacatctttcgcaggcactccggactctggtcggcagtggcgaccggacataactgcttctatgctcgacagtgtcaacagtgaaacctccagtcatcatgaggttatactgaaggtggcatgtaggcaaaaaataagatttccaaactaaccaaatttgcgcgtgtagggtcacgcgcttgagtttatctcatccgcggatgttccacccgaggtccagggttgtgttccgttcggatataggcacaaaagtaggcaacgtaaaaagtctagatactttgttattaagaagttgtgtaggccatacataactaatcataactatattaaaggattagaaaatagcctcagcaattctcaaaaaaaaaatcaaaaagaagaggtcgtgcccgggatcgaaccgggattgctggtatcagaaaccagagtgatgaccattacactacacaacctgaattgttggaagggcagggctcaaaagcttcacaaagaaaatccttggacaaaagacaaagcttggggtttaatccaaatttagaggattccaggaagcctctaaagtattcctagccgtatatcctagataattttagggtcgggatctattgtcggtattgagggcaaatgcaaagccatttttattgaagcttcatagtgtttaataaggaatatttcctcaacaaattcggttgtgtagtgtaatggtcatcactctggtttctggtaccagcaatcccggttcgatcccgggcacgacctcttctttttgatttttttttttacatctacaaatagctgttgacgggtgagagggtgttgatacaactatgtagccctttggctggtattctctgtcatcttgtctatgatctcttaaacgccaccggtatttcccgaaagaaggtgagactgtttgagtgtgtgtttttggccagtgcaagtatggaaaaggcgtttcccgggtttcgcttacgaatgaatagaaggagatgagaaaacggaaacccatttaaggtgtaagaaacttatgtgaacttctcagattgtcactactgtgtgtttattaaatggtttttttggtatgcgtttggttctcttggatgttttcgaatatccttttggaatatataatcagccgtcaactaagtatggaattgtagaacaaacttaacaataagtttctacaattacatgtaacatacttgatggcttggtacattcatcggtctggtttcccatatataacccctctgatttccatagtaattagacgcttacatgttgaagtaatgttttaacatgtcatccacatattgtgtagaatgactggataggggatgtatgtattagatcagaatagcgtttactgggaatttgtctttccgatacacatatgagatgtcttttagtatcatcataaaataactcagtattctatctgcgcgctctatcgttaactacgaagggcatgtaagcgtcctgcgattcttacactattgccataagctccatcatgatagtgcttctcaacttcactattctaacagcccgcatctcactgcgtcaaaaacttattaggtacataacgcggcatcgaatcctcccacatgctatcagtgaggaccgttttgttcgagccatcagcatccataaccataatctggccgtaaggctggaaggtatcatcgtaagtcgcagcttcagcctggaatccccacattccagtggaccacataatgcggccatcagcagtccagacagcgtgggcatcgttagcaaacgatgtagtgagcacagtcaaatctgtcccattaggacgaataatgcacacttcataatttgagaactcgttcttcgacaggtcggtcatattgcgcgtaaacagaacccactcgccggacggcgagaagaatggcagattatcacgctctgtcgtcagagtggtggtctcgttagagtttaggtctagcaaacgcaggccgaactcaggcaggtattcgcggtacacgatcttctttccgtcgggcgagaagctggggaatcccttattggaggagttgccgaaggtgagttgctcatagctcgatccatcggacttggcccggaagatccagccgggctcatcggcgcggctttggaaccaccatcctagaccgaaggtgatccattcactatcagacgaccaggatggctggaaggacccaccttcaccgctggaaacggtggcttcgtcaagcgcgccggtttcgtaggtatcaaacgccaaggtgaatttggtgtcgcccgggggcattacggctatagaagaattgccggggctacccgtttgcttggaggtgaaggtcaattgcccatcaagagagagatcggggaagacgtccatgaagtggtaatcccactccgggtcccaggaccacagctccttttgcaatggccggatctcccagccagtcttctcgtagaccacatgtttgccgtcagcagaccaggcaggtgagcgcatacctccgagaatcttctttgcactggaagtgtagtgaataccgccgtcgtctccgcctttgagcaagtatccgatgtcagtgttcgagacatactgcgggaaaatcttgacaccggaggtattggtatgttggacaaaatcggttcctgtttcgaagtccacagaaacgatttggttggttgtggagttgacggtgaacgacgaacgcgcatcccaagttgtttgcaccgtcatctcgtagaatacaactcgcttgccatcgggggagaatctcggcgacccgtaagtgtaattcgccttgctgtacacctcgcggaagccagttcccttgggggtgatggcatagatagccagctcttgagtatgctcccagccagtgccattgtcatgaccggtccacgcggtgtttcgatcagaggaaaaaacgatccattctccatcaggcgaccaggcaggcgcaaagaatccgcttggcgactcaggcttgcccgtcacaccagtctggttggtgaggttgcgggtaacgccggtcccgaggttcttgagccaaatgttggaggtgtagacgccggccgtggaggcgtaggcagcgtacttgccattgggagatataactgccgcatcttcgaccgagggtgtggttgcgattggtgtcagaccgctgccgttcacgttgaccatatagatatcggagttgccatcgccgttacgttcagtggtgaagacgacgtgcttaccgtctggatggaaggaggcatggtattcgtagttggaggcattgcccagcaaggagcgttcatttgtgccatctgcattggcaatgtacagtttggatgaggagggattgatacggttcatcaacatgatgcctttctttcccggcacagtacgagggagcacggcatcagagcgaggcttgaggcttgcatctgctagatgcgcgtaggggcaggcggcctggcacagtgaagggcccaatagggccagaagggagaaaaagaacatgatgttctgcaccggatcgatgcttggaattccgcgagaatccagtatgttgcccagccgatcattctttatataacagccatttttgtagaatatatatagaaggccaattaaaatccaatccgggttcttcggtccgaatgtctgaattgaagatttgctgattggatatggataaactgatgacgatcgtcatgttaacggagggccacaatacggagtaactaggcaccatgtgtgtgatcgacacaaggtattgccttgaaaaagaccgagattgcaattgtttcaagaaaagcattgaagatcaacaccatgcaaggaagataagcccgagatactgatgctcggagatagccgattgagcgaatttacttagggctagacatgtaggtacgtacggagtactccgccggacattgtaaaggagctcaaacaggacgagaatgcatgagtgctgaagataagcactattattcgattgactacggagtataaattcatagagacgaatccactgaagtcgggagtcgggaccgaggcatgaagtgttttatcatgcatccttatcatcacgtgctgtcgtgtcagggacgcgttggacaactttattttcaacgatcaaagccaccagctctgacaactagatcccgatgagtttagatcgtgtcattcaggattccgacgaggacgaactctcggagggggatgacctttccacctccgccaaccccgtccacccatccgagcccgcattgcagcaggaatatcaacatgcccccgccaaaaatacgatccacaatgcagtgtatgaacatggtcctgctcctgatgaaagcataatcccggagttgagcgtcgactttgatgagttcctccaatcccaagagaagggtcagtcaatgttatcttcgtcgcagcaacggcgggaggacaaatggataccctcaactgagggtggaagtgggtcggttggtacgatgtgacagcatagtctgaagtacaaataataagaagtgatctatatactgataccgaagatgatctaggcgccatgatgacggagatcggaatcgcgcagagaagacttatggacgacgacccttcaagtgcaagcctcccttttacggccgcaccgtactcgatagaatcatttcagtccgcgccatttcctaccgtaccaggttaccacccgtatcagatatatcaaccggagaatggcagcttcacatataatccagcacccattggcgcctatgtcgatgccgcctatgtcgatgcaaatcagactttgttgcccaccagacagggtacctatgacttgaccccgcctgacaccactaatacaatggcctcgcctccgaaagtcgttccttaccacgctaccgagccttttatggaagaagagaaccctcagtcgaacccaccccagaaagcctcacaggcgaagtctcagcagactggtcccttttccccccatgacactgagcctctctcctcaattgcatcgctgaatcgcatggatgcaaatattaccactgctggaaccagtcttatttccccgcagcaatcccaatcaagcacgcatgacgagctcgctctccctgccgtcttaccaaatatgccagatgtcgggctgaccggtgtaacgaagaagcggggacgacctaagaaacaaactgggctaaataatgatgaagacgatgagctagccaactctcgagaccacgagttcaaacaccctggcgcaaatggtgcgattgacccctccgatagcgaagagaccacggaagataataccccggcctcgagtggagtctccgatgagactgacgaagaaaacttagaaacagcccctaagcctgcaaaatcaggaccaaaggagccgagaaagaagaaagctaaaaaaggcaaggcgacacctgcccctgatgccgatgacgacgtcatatgggtagacacgaagcctctcagtatggaaccttcaacaggaaatgccaccccgcaggcagaaaccccaaaggccccgagacaggatttagactccaatgttttggactcatacccccaggcaccgattcccacagcagaagagaagacacaaaacgtgcagaaagccgagaaaccagcacccaaaaaacgcggacgcaagcgaaagcagacaaccgaacaagcggaaacaccatcagagtccgcagatacacccgagccaaacaagccgccctctggagcccagactcctgcgccgaatgtgtccgtcgttgtcgataatagtcccaaacccatgccgatagctaatactgataacaacgatacatctgctactcaaagcaaggaccagaaccccagtctacttcccgatcctgaacctctccctgaaactacgattgatacccctcagcctcagactccttcgaagcgcgatacttcatctgtcaatacaccccagaacggaggaaagggcccggataagcacagtcccatctcggcgcggaatggggtgccttaccgcgtgggattgagtaagagggcgaggattgcgccgttgcttaagatggtgcggaaatagggagagtgatctgcttccttgtgatggtcatcttcaagctgtggttaggtcttggcttttttttttcattggtttggtctgttgctgctattattctgctatcattatacccctcgagagaatgttctcggcctgctttctttgttacttctttttgttttctgttggtattggtatctgcatattggtatctgcatatcttccatagttgcatgtctacatatatttcttcatttacatggaataggtgaaaggtaggataatatcctgaccaggtgtgagctgcgacgatttgtcttgagatcttctctagtctcaatatcgaaaaaattacatctatttggaggagcagagttcagcttatatgaaagcctatcattactcgagcaaaagacgaactttgtattgcaattctgatacctcttgatgattcctattccatgagctagctaaccctgccgtgtctgccgataagttcaaacgaatggtttggccacaatgaagccacagcatgtaagtataactataatctcgacaatgtaaaacccggccaaacaatcatggcaatccaatccaaagatcaaaatgattcatcacatccacatcgcaacgatcaaagcaaggaacaacgatgttgcagccgcggtgccaatggttcggaaatcagaatcagcttccgacttgtgacccttggtttggactttcgggtcccaggcatcgccattgtaaggagcctcaacggaacaatatccggcatccttttgacagccgcttccacaatgactggtggtgttgccacaagagctagtactaccacagcaaaagccataggtagatccaaggcaagtgtagttggaaccacaggacccgtcccaagagatcggcttgttgggatctgccgaagcagtattcttgggcttcttcttctgagtgggcatccggctatccttgcggtaccagagtggcctgggatcacggagacagtcgccgacggtaatggcacgatagccttgccgcttgatgcccttgagcatgtgctctgtgaggttgtggacggtctgttcatgggcgtcatgggcaatgacaagccatgatttggtgcgtgggtcgctgttcaaaagctggtgatcaaagatatccttagaccgttgaatcagatctggactgtcatttttatagtcatccgtgtcaatgtcatacaaaatgatgtggtatccaagctcgcccagctcatttccgcactctgtgtcagggctgcagctggaataaggcggccgcatgtaagtggggaaagatccgagaatgttgcgcagcgcagcttcgttcttctcaatttgctcattgcgttgcgaaggagtgatcttactgaggtcctcatgcgaccatgtatgactggcaatctggtggccactcgagtgcatgcgttcaatcaatgaagcccatggcaaggtgaggtcatcgatagagccctttccgttgttgatcccagtgatgaagaatgtcgccttcgcatcgtatttgtcaagcaaatcgagcagatcgccagtgtaacgtgtcgggccatcgtcgaaggtcaatgcaacagttccggggatagcgcatgaacgaatctcgcgagggccgtacggaacttggccgacgtgaggacgggggatttccttggttgggggtccagaaggcgatcggtgagcgtcacatttaccgtagtcaagcttgcagtctggagagcgacagtgcgccttcgacgtgccgcagaaacctatcgtagaatgacatcagtaaggtgctcaagctaacaggattttgagaacatacctgcacccgagcagcatgtaccgaccggacatttgccgatcttggggccacagcgatagtccaaattgttgggggcatcacgagtgtccaaatgagactcggtttctggttgaggttgttcaattgcaaccgtatgcacaggaccgacatgcaatttagcaaatacacacgttgccaaagtggcgacccagatgggttgaatacgcatcttgagaatggtatatagggttaatctatgttcaactgggtatgtgagatgcaatgggttgggatgatagcaacaggtgattcggagtgagaggagaagagagaagaggccagcaggatgggggaaaagcaatggagctaatttctacaagaggaaggaggacaaagaaggaaagagcgaagcttcgaggcatttttctacttaaatcacaaaacgcaggagcaagtatcgtggcaagagctcctaaccttgacaaagaggtgtagaagtagagattgacggcgcttgtattcaatatgaacgtgggtatcgtgaaatccatagccgtctggggcattggaaggttgatctgggagcccagtacattttccggatttagcaaccaaagcctagtgggtgcgatcaatatggtcatgatgtgactacatatagccaattaagatcagacgcagcacatcgggctcctgtagcagcccttagcatcatgcgtaagggtctaggcttcagtgtcggtcagacatctatcatagggcaatagttatgacaaatcaatttgcccgggtaatgttatcttctccgactgccgagaagacaaaaggaacaagggtatccaggtgtgggccaaacttcccaggtgcggtttttgcaatggcgccaattgcagcgatcaagtgccgacgctgcaccacagaaatctcggaagacaatgttttcgtcagatcggacacaaattcgttgagctggttgtcggagaagtagagcacaagcgccgagatggctgtcagggcgcgtttagtgacaacagttccagccgtgtcgttttggatgatggccatgacggatgcctggagggaagcaagctccgaatcttggagcagaggcccaaagcaggtcacgaccttgatgagcacatcgatggcatcactactgaagccccgtgatggatccttctccatcatgcctctcaccactgagctccgccgtcctgtgattgagagagtcggtccagtcaaacggggaaccaagacctccgaaactgctgtgtatgcaataatcgaattttgagatggaggctggcccgactggggacgagggagcgtatcgacgatgacgcgaagagcagtgttggggaccgatgtgtctatcgtctgggaggcagtcaaattggccaactgctcgagaagaggtgtaagggattcgagtggtaagcgaactgcgagaggaccgagactgggttcgagttagatatcagcaggatcggagggcaatagagctcgaataccatttgagggcctggttctgcacgtcgccgtgttgatcatccaaggccttgagcagacctcctgcgagttttgttgcagtaccacggtcgtgggagaggaataaagaatttgggttggtcaggattccatatagatcgttcaaggacatgtatctcaagtccgcatcggggtcatcaagcttcgctagcagggcgaaaattgtctgctgggtaacctggcggtccgccatattgacgaagctatgactgttatcggtaaatgaggttgagagaaagcctagccaaggtgacgagtgaagcagtggatagtgaaagcaccggggagagcttgcggtagcctttgatagacgccgcaacgtgggggtgtttccgcctaaggtgtcattattatggcctgaggcatgattgcaactcagtgacaacctccgaaaatgtcaactttgaacataaaatatcggttagatcttcgaatatggcccctacatagtcattttattaaggaaggtgacattgaatacttggatttctccaattatcggatctgatactcagtcgagatgcacgtgatgacgaacaccgtccaagctccaagaatggtcgttctattgataccccgtgaactataccgaggtaataaaagttgtacctgcaaggtcctctgaaagtaccagctaccgtctaaaaccaccaaaaccaacgtattcgtcaagtaccaagtacctggcccaaccatgccaattacatcacgacgcacagaccatctcggaaacaactaggatgcggtcttacgacaccgagaggtcgacttgcgaaaaccgggaagctttggtgttctagtgctgacttggcgttgtgctttgtgctctttgtgctccaatctactttgtacctaaacaatccattttcaacctatcaccctttccacgttctccatcaattctactctgtttgtacccaggttgctactacacaatggtctttgcgcgccgttcaatcttccgcgctgcgactgcagctcagtccttccgtgtcggctctgttagtcgccggtctgcccagctccttggtcgacgattcaagtatactagcaacagctatgagccagggccttcatccagtaacttgccttggtaagttatgttcttccaagaaatcttattcggtcttctaactacttctgattgtaggttggtggcctctactgctgtgactgttccaatgatctatttcctctggccttctggctcgaagggacatcacgacactcacggggacgaacataaagaggaacacacggaggatcacggcgaggtagaggaagcttccgaggaaaaacctaccgaaggatcctctgagccggcgcccaagaaggaggaaaagacggacgccgaggagaaaggcgaagagaaggcggataaaaatgaagagcccgaagaaaagaaggaagaacccaaggatgagaagagcgagtccaaggaggaagacaaggaggagaaaaagcccgaggaggagaaaaaggaggagaagcccaatgatgatgactctaagaaggaaaataaggacgaaaagaaagacgaatccaaggaggacgagcctaagcaggatgagtccgaggatgctggaaagggcgagaacaatgatggcgaggcaaagaactgaagacgccttactcccttgagcggctgtagagccaagcctgtgtatgatatttcaacatgttaatgttcgattctttgtcccatactattcgtgtacctgtacctctactatatatgagatatagataccagtcatgttagcgtgctgaagaacgatagttcattggtctattctgctagtccggtctaatcttagtagtcaatagttggccgcttatacgacctctatacttgatgatatagggttggataatcccaatatagattgtttcaagatgatatcatgaacattataattgcaattatattacgatgcctttttaatacatttagagatatctttctaggtgccttctaggataatctgtcgtaaaccagaatatgtcgtctgccgtactcttgttgctcttttgaaatgtcaataataagcgcacgtcttaaaacacaaaggaagaagaagaaatatcatcatattgatctaaaagatgaaccaaagaaaaaatagggaagcaaaccaccacgtgacacctaaagcccttccctagcagtgtttgacaatcgctcacagtatacttaggatcgtgatatcacatcttgattcttaagcttttctaaatttactagtattttgtaagttcacttagacgttacctagaagttacttagacgttacttagatgtggctaagacgttacctaggcgttacttaggcgttagccgcgctacttagaagttacttagacgttactaaggcgttactaggtaagagaaataaaagtattttgtcaaaaaatctccatgaaagacttttagttgggccgtggtagccctgagtgtaccacctagcttcaggacaccttagcaagggccgggtattcaataaaacccacggcgttcaaagaaatgcctcaatgagagtccatcgggccttcgcataacatccacccagctcaaatcctcctttccttcctcccgagtctcatcaatgagattccaaatgtcctggacggcagtccactgtgccgtgacatttggaaggtcatattgctgcaacgaacgccacaaggatgcccacaactggcagtccttgctgttgcaggctcccacaaaagcagggaaggtgacgggtggatctctgtgcatcacctcgagtgccaccagtgccttgagctcttcggcatggagcaggcacatcaagatggcatccacagggatggaagtgtcgtccacgaagatgtggttgattcgattgtggaagtaaaggcacgccgagagataccaagccacttcgaggttgttggagattatttgttgtaccttcatgccgggaccaaggaaaattgggatgttatcatcaggtcgaaaggtttgtagatgggaagtcaaacaatttatgtcttcaatgaggtgctctggtaagatatgaccgtccatgttatgttcttcgattgtttctgccaagtcttcgattttcttgatggctagctcggtaaagtgtgtgatataatttagcacaccaaatggtaagcggagtggcatagtgactacttggagtagtggtcacaggataaacaaggtggaaatgatagattgaatggtatgtcaaatgtgataggcaattggtcgtgactgtggtactcagcaaagaagggaagatgagagtcaacgaggaagggaagaatactcggagaaatcttctgatataaacacaaattgtagctactattcgtatattgacaagacgctattggcattgatgcctagacgatgcgatgtgattaacaaggcaatattaccttcgtatatgcaggcatcgaagtaggcagttgatatagtttgtagaaggtacaaaggagaataggaaagaatgagcttgttaacgacaatagtagcttattgccaatgtattttgatgcagtgaatatggaatctatatgcattatattcttcactgaagaaccagggaactggtaaatatgcagtttgtgacgagctgtctataagtgaataagtttggttatactctcgattcattgctagaaattctatcatccgaagatcttggtaagacttcgtataagatcctagtataagaccaaagcaatagcacctgaggtccgaagaagacgatataagcgagaaacgtggaagctctatctcgttggaaacaagaacccagttcagtcgtgtttctctcgcactaccttggagcttcaacatgaagttcgactccctcgaaacaccgagaaagggttgatatccgcttttcgacatcgcgctggttgtttcatcactgtgcttggtattgtctcatgccggattcatccaggccataaaggtaataatcccctctaccttggatgatgttcattactcatgatatccggcttgcgaatgttggttgtggagaaggaaaaaatcaagtctatctgatatcatatcgctgggagtattcttttcaaaaagaaaacaggaccaggcttaattgcttacaataaatatggttggttgtaagtccctttgtttcatatttgcttcataaatgacatccatggactcaaaaagtatgttaaaaaaacacaaatgatgtacatgaatgacaatagaacatcaagagacagaaaatgtagtaaaaattatttaattcatatgctcgtcaaaacaagtgccggcgcccgctcttctagagggctatctcacaggcactgccaatgtaccgggctcagacccagctccaacaaatacataacagcatatcaacatccagaggatcagctggagacacacttgatccaatgcataactataaaactgtgaaagtccccaactttgatgtcgggtaattgtttgaatgctgatcgattaaatgataatcgatcaaacttcagggaaagtgctagacttatgcctttctgctgcgagtccgaggaccacgctgttcagtgacaggctcgccgttgagcagaacctgaggagcgtggttctccttgccagtctggtctgcgccactggcaattgccttggtcgcattgacagactctagcgcttcctcttcctcttcgtcctcgctacgctcgtcttttgcgacattggtgaagatgtagtttgacaagatgcgcaggatcaggaacagccagaacaggttgacagcctgcaaactggcgagcagcgaaaaggtgatgtactgactgatccagcacttgtactgctgtgtctcccagtttagctcgaagggtccaacagtgcggaactcggtcagaacagcccagaggatcttcaggttcagcacatgacgcaggtaaatccaccatccaacgaacatggcaaagtatggcgcggtgatatacgcatccagataattgagcgtcttggaggtggccaaaaagaagtcggagatatcgtgcgtgatatacaccgccaagcccatgtacgtgaagtggaagcggtagctcagcgcaataagcgcaagcgtgataatatggtgaccaacaagctccttgaagtccttgcggggcttctccaactgcagcagcaatacaatcgcctgctgagcccaataactcgcctcgagcaggtagtacgccttgaacagaccctcgtgctcgcggtgcgggaagccctcaaacatcgccgtcgtattgaagtaccagatagtcgagcgcttcatcacgtacagaccaaacggcccgaatacaccaaagtacacggccgtatacgcttgctccatgaaccgagccgttttccccttcccacggataccacaccacaccgcaaaggggcggatcatctgctgcataataaattcgcgcgtgaacgacagcacgatcgtgtagaacgccacgaacgcaatatcctttttgcctttgccatacatgatgggtccaccgggagtcttggggggctgcgggtaggacaagaagatcgcgctgtgcatcgggttcgaggttgtggggttaagcgcgtacaacccgagcaggaacagcatcacgataagcggcaggagccatgtgtatcgcagacaggtatccgcgaagcggtggaggagggagcgactgcgacgtcgtttggtctgcgccttgctggcctgtttgtgtgcgacatcgaattgctggtgggattacgggttagtgaggggatttgggtgggcgggcaatgactttcaatacgtaccttcagaaatggcgatgatggctcgataggactcacttcgttcatcgtggacatcgctggcgcactagtgtcaccccgaatgtccacgcccaaggctgatgttcgccgggggcgaaccatggcgaataggaaactcgagcttcctacccttttggactcggagggttcgagctcacgtgctccaatggaaagaggtggatgaagggaatgagaagagagactcgagactcataaccaggacgatcgggtgaagaagattgtgaaaggtgactatccattttttttttccagggggtgaagaactccacccccgttgaccagacagcttcgcagctccgatcggaaagtcttggcatcttcatttcctttgatgcgcctttttgggatgcagcaactagcttctcggaaacccctatatacatcccgggctggtttggaattcgcctaggactgccaatcaaatggccaatacttgcgagactcccacggaacttgcgagacgaccgcggacagcgacatatcctatttgggaccccgacgtgtttacgatcccacagtcccgaatacgagcatattgaagctggataaaaatgttgggattcgttgatatatgcacggattgtggatttatgcagttgttgaattgtataacatgacatcatatcgacatgaacatgtctaacccaaaagagaagcaaaacaataatacagcggagccatctaacaacctcgtctatacacgctcaacttctatgcgtcgacaacctcagcgtgagtggcagcgcgcttgtcagcaccagccagtttttcaccaaggatctcaatatcacccgactcggcagccatagtgcgcttggtatcgtgggtagtcttccaggccggggtaccgatataagggataccgttgggatcctcaaagatctgctcgatttcctctagagtcttaccagaagtctcagggaacaagaagaagacgtgaatggtcatggcgaacaagaaaacaccgaaaatgatgtacgtctgccagcggatcgtggcaaaagcagtgggcacgaacagaccaagcgccgtgttgaacgcccagttgaacgaggtagccaaagcaacggctttaccacgcacacgtagagggtacagctctgaagggtacacccacgatacgggaccccaggtcggagcgtacgaagccacgaacaggtatgtgcaggcaattagtcccttggcaggggcgccactcagaagcattgatgcctccgccacgccgtcaataccgccggggacaatcacgccgtacttggccatgatacccgcgttggcaaacatccagatcatcatgaaaacagcgccgatcaggagagtgggacgacggccccagcggtcaacccagatcaaggcgggcatggtcatgaccacgttgatgatgtactggatggaggaagcgaggagggtggcatcacccttgtacccggccatggtgaaaacatacgtgatgtagtacatcatgacgttcataccggtcagctgggaccagatttgcgtccagattccagtcatggtgcggtggatcatcctgggctcgaacaactcgaggtagctaacgtccttgttctcgcgctcgaactcgcaaatgtcgcggatctcttgcatctcggctagaacgaaggggctgttcatgtcgcccttgccgtggaccagggtcagcaccgcctgacactcgtcccagcggtccttgcgggccaaccaacgaggggactcgggcaagaccatcattccgaagaagaggagaacagcgggaactgcctgtacaccccatgggatacggaagacggactcgctgtagttgtgggaggtggagctgttgccatgtccgatgaatgagcaaccgaaggagatactgtggaacaagagtcagctactgagtcacttttcgaatctcaaaccaggtgttaccacatactagtacatgatcaggataccccaggtgatggcccactgctgagagccgacgagacgaccacgcttggagggaggagaaagctccgagatatagacaggaacctgggcggactcaattccgacgctgagaccgttgatgactcgtccggcaatgagcatacccatgttctgggaagcgcatacgatgacggagccgataaccctaacaggatgttaaccacaacagctcaatggcaactccaccctaaccatgaccacttaccaaagaacacaaccaaccatgatagcatacttgcgaccaagacgatccgaaatgaaaccagagataagagcaccgagccaagagccaccgggcatggcagcggtaacaccaccttgagccagggtgctaagaccactacatacatcgtcgtcgttgaatggagggccccgaggcccatgattgaaataacacttataagccggcgtcccgataatggccgacatggacgagatatcgaaaccgaacagtgcaccgccaatgacggacaccgccgtgatggcgtagagattccccacgacaaacatggtgactgttagacccaagccaggggagaatgatggcaaaagaagagagaaagtacaagaaaccgaaaaaggatgaggaaaaacctccctgcttaaatagatcgcatgccggcaaaatgccctacagtaagaaatacatgactagtcaaatccacccgcatataggcattgttttcgttctgttttcttccagcatccccactccctatcccgtgtatggatcgtccacggagagggattattgtaaaacatgtgatcatctgtagataataacaataataaaaagggagagttacaacaagactatgccaagactccgcttgcaaccccagctaccaaaacgaactttaattggcggaagccggattatgcttatccacccgctccatgatgattggtggactaccccggcaaagactgggatccggggaatcgggccacgagctcacaaaattcctaagccgaagaaggccaagcgcggtaattgagaagttccccgaatccggaagccgtgttcgggcgagaaaagagtcggctgattccccttggacggcagtggcgtttctgggcagtacttaattattactagaaaataaaaataaagacactcttctggaaatgaggttctttaggaagtgtggattcattcaaaacagggtgtacgattttccgatatccccagacccaacccgcatttccctgtcaagaaacaggtcaacgcaacacgtaccaggtaattttactgtattatcttcgcaatttagccggagtgcccacatagctacgtaagaaacgaatgagaagaacatcacttcaaccggtgacgctcaccatcttaagtccggggccccgtctacggccatctttccagaatgggacagtacgcggcttctcgttaacttcagtggctgccgctcgccgaggtggagtcggcttgaactcggcctgcggtggtttttttccttttctggactgatgttggcaattgttgtgcctagttcgcccgctgcgaagtttgattgtgttcggggcttcggactacctggtattgtcacttgctattgggatggagtggaatatgaatgcccacgttgttacgtagatgatcatctagatcctcaaatccattcgtatatcttatgtgatgttccccgcgtggaaagatgcggagggctgggggaatccgaaatcctaattgcgctcaccaagactagcgtggatgatctctcatatgttctggcttttgctcttattttcaagccactgacatcaatggtgcaggccgttgcctttcttcccccttgatattgcacgggccatggtaatctagttaaagtctcatccaagaacggccatgtccaacgtacgctagatatattgactggcaccacaccttttgaacttgccagaatgacttctaccatcaggtccgcgccagagttggtgatatagcatgctacttcacctgaaatcgagtctcgttgagggtaagaacaacatcgcattggaaatacataaagataactgcttgtggtagatcatttgacaaaatacaaaaccatttctggaaagagtttccccgctctcaacacccgacaattaatatacatcactcgggacctcattatagacacgaacccgacttcgatcaacatcaccagctcctatacagaggaacacgcggctctcaacctcgttagacgttgcgatcagagagcacgctgatccactttcaccccggtagaacttcaattgttctccgggttctgaggatcatatttccaacggcggtggttctccgaaacccaccacttggccacatgggccgcctcgctgagccacttcacagcctcgggtccatgctgcttccgcacggcgtcgaccaagaacaggagttggtgatcttcctggggtttgagctcgaatgggtcggcgacgacatcggtgaatcgccacttagcttcgggcttgaggggcacgatcagacggtacggctgtgcggccgctcgcatggtgaaccacgttccaccagggttcattgtggagaaatgccattcttgcttgccattgtgctcggggatgagtgcgcgtatcatcgactggccctcgtacatcggaagtaggtctttgatgatcttattagactgcttatcaatagaggaggtttcgacgagaagatcgagaatcgtggggagaatttgggtagagaggacagcagttttgacttcgatctggggcagcttagggtgagagaagaatagcggcacgtggaaattgccgacgtgaggggaatgccaggcggtgataccgccgtcatttggaagtgataggccgctaaatcaagtcagaggctgaatggactgcgagttataggtagaacttactggtcaccagtcatcactagaagggtctcatcggcaatgccggcatcatcaagaagcttcaggatctcggcgacccactcatcctggtaggctatagtattgaggtatcggttcaacctctcattctgttcagtcgacacatcccccagcatctccttataatcaccagggatataatacggagtatgtgtattatgtgttaaatggctgagaaagaggcgggtgttgttcttcttggcatcgtcgatgacatcccggagataatttttcaatagcttatcctcatggccatgttcctcttcctctgctgtttcttctgggatatatttacgaccacctgcgtcgattgttcgctttgccatgatatccttgtaccctagagcaggatgaagcatataatgcttatcccagtcgtcagggtgtgactgcatccacatagtatgccacggccaagaagtccagtcatctgcctcgccagtggtgtttggctggtggtttatcgcatcgagtatgtgcggcaagcaaggctggtaaatatcgtgcaggtactcgaggttggcctcaacagccatgggattcactccgcacacagtgcccgtaatactctttaaagtataggtcccggaagtgtaagcgttgcttgcactgatgccaccatacggcttcggaagatcatccccatccttatggaacccggtcccaaacccggtcaagcgctcggcggtaggggtgagcttagtgagcctctcctggacgtccttggggatgccgtctgggtaagattcattgacgtgcttcatgatgtaagagtttgagcggaagggccacacatcctgtcgagtgctctctagcttaatgagaatgacatgtttaatcttcacacttccgttgtggagaagttcacgtataggctccaaaatatcgttctggaggtttggcgtgtgtagaggatccttcaacggattgtagtgttcatacacatagtcggccttgttgtgtttattgatgcggaagggagaccaatccgggaagccatctgacgaattgtatgaaggtaaccagtcaaatgtggggaaggagtccagagcagtgtggccctccagccagctgaaatcggccggtaacaaggtgacattttcataggtggcatttccattagcaggaattttaggggcgctttctggaacacttgctgggactttttctggagcctttcctgctggggtactttctggggtattttctggggcacttgtaggaggggcaattgcaggaggggcacttccattcgctggcgttggagtttcatgagcgggcgaatatctgtggctgctgaacggcgcaagagacagggagccagagagatagccgtagtccgcaccgcgtggacgaatgcaactgaggagaactaggattaagccgcacgatatgacgatcacgcgcttcagcaacgaccgcgtcggcttctgctcgggttgacgaggtgcatccaattgtgatacggagtcgctgtcgttgtgaccctcatcatagtcatcgatttcaatctgctgataggtctctggatcggacaatggctttcgtggaagacaccggcggaaagggaatagcaaaaacgaaccccaaatctccaggaaagtttcggtggcttggaagagatacggcgtagcgaagtacgcaacgatcataatcaacgtgtcgacgaagataccgacagtcaacatggacaggacagtctgggtagccgtattgggattttcctcctgggaactttccgacttcccccagtgaatctccgcacctgtatgtacatagaaggagatgttggcggaagttacggaggagatatatagactgagatgcgattagcaattgaatgttgcttacgagtcccggacgacagcttacctgaataaaagagttacaattgcagctacgttctgccaaacccgcgattcaaacgaccgggtcaggtagcacgcgaccagaatgagcaggatgtccaccaggaagaaggtggggccccacggaatgagtgatggaaccgcgagcgacgtgagatggacgcagagatggaagcattttgacaggatgagggagatgaaagtaattgagaagaaatatgtgcgagacgcgtccaggtagagctggggggatctggccactttgagggcgaagatggccgaatcctcgagttgccgacggagctgggagagatctccgggacgattccatgaagatttcatgccagcaacagcaccctctgaagggaagacaggctagaaattgaggacggatacataagccgacaaggaagagagagagacaagttaaaaaaaaactggacactgaaaatccaggggtccaaccatagggcggggcacgggttcatgcactttacggagcaacgcccgggctcttcctgacggttcttggcgcaaatgtgaccacgtgcggaattaccgggataggcaagggggagagcaaacagtgcaaatagaacaaagtcagcaaacactatcgactgcacttgtaatctcgacctcattttcaactgggaaatgtcctaggtctaattaagttacatgcaactattgttgattggtggtgaggagattacatgtcttggtcttatttcgcttagcagggtctagacagaatagatgctccgtacaatcgaacacgtatgttagttgtaggggccaaagcgaatggcacgcttactgtctctggctaattaaggggtgagaactaagacagaaaaggaaagccgaaatctgacaggcttacggtacaacatatgtgacatttctgttgtatgtcgccacttctctatggttgtaatctaggggttccttccaaagttgggatcatccggacgaaccttcgaagctctaactacatgcagttaagctgtttcaaaccaggttatgtcagtccaaatgaggcgagctgattggcaaccccctctttcagccttattgggccgatcgacattgaactatgcttggcacacatagaaccggggaatcaacaaaaaagccgattcaatatatcttccatcaagccatcttacagagatgtggatcgctcaattgttaactggatttggcggatgcttatgactacggtatttctgtggaaatatatatgtacactcatacccgcccaagattgagtgacactctatatatagttctagacatcacgatgacatcactagaataccaccagaaggaggaacagtcggtgagttgtattgcactcgttgacgtatcttagatctcttgcctatgatacactaaaccgaaggtcacagatgatggtgtactcgctggtacaatgccctaaacgagcgggtcaactccgctcagcgaaaccagggtccaggacccaaccgagattgcgctttcatgcatatatgtatctccctatagtagcgagaaagagaagtcagccgtcacattggaaggcccttttctgtctgatccagacagctagctgcacgtggtacttgctgatatgatccatatgtgatcgaccttcattatcttctttgcctgctgaaatcgtattgagcaatctccactacgatttcaggcttcctgtatttacgagttgattggcttaaatagacttgagtcattagtgaaggacgtgaaggacatgtcgatgagctcttcaggtacaggccaggtcgcttttccctactttttcggccaagttgtgatatcatgttaacaagactacctaggtaggtacatatgaatgtatgtatgcattcatctagatcatcgcaggaagagtatcgcatttgcatcatcatcagagtatcccccatcgacgttagagacatcaactgcccttcccctacctagaccataggtcccgtggctgcacagtacaaagtccgaccgcttctcttcttgaaagcgtcctttctctccacttctgaaacttaggaacattaaagttcggataccgatcgtacatctcattggggacctctgccaattgatccgcaagatcaaaagcagtctccaaccgtccattcagaagcagggtgatggtaccaatgctctcatatagtgacccataatcttcaactccgtagcccactttagttataaatgccaaccaaagtctcattgcagacaaaggccactgtggacgtgttttgtacttcagaacctcatccatctgttcatcgtcccacctggggttgccacaacgattggcctcccaatcttcataactcatgtgaccagggggaaatgatagttccgtctccgctgagtgaaagtcgaggacgagggtttcagcgatgattccacggtcatctttcctacccactggtccatatgtcaagaatcggtccaagtagcggtaaaaacagtgattgagagagaaggtagcgctttcagaacaaagcgcatctttactggtgacgatgcgtccaaagaagcgcatgtctatgtgcagcgtagagagacgggtcgtaagccgtgggactgaaatccaggttgaaaacatatacatttcatttagaaccgaaaggtcaagaatgtaggtggtttccttcattcgattgaggacctattgggtttccaccgaaacttgacgatttgtcaggagcagagagagacagttcgaggggagatccatcaaggaaggcatgattgttgatcgggcctcaagatgtttgaagaagttggcaagtactgagtttggaagctgaatgggtgctatttatgtcattatataagcctttgtctaggtaacctttgtttgccagtcgctttcaggcaacggggcactttaggaaggcacgtgggttggaggtataaaagggcctccttccccccaactcttcttcttctcttcttctctcctccacacctctctcaaccaccatctctccgtagccccatgagacagcgtcggcagagggtgccgtagcacatgctgcttcacctaccacagggaccatgacattaccatatgtatgaggtccatgtaggtctgcatnnnnnnnnnnnnnnnnnnnnnnnnnnnnnnnnnnnnnnnnnnnnnnnnnnnnnnnnnnnnnnnnnnnnnnnnnnnnnnnnnnnnnnnnnnnnnnnnnnnnnnnnnnnnnnnnnnnnnnnnnnnnnnnnnnnnnnnnnnnnnnnnnnnnnnnnnnnnnnnnnnnnnnnnnnnnnnnnnnnnnnnnnnnnnnnnnnnnnnnnnnnnnnnnnnnnnnnnnnnnnnnnnnnnnnnnnnnnnnnnnnnnnnnnnnnnnnnnnnnnnnnnnnnnnnnnnnnnnnnnntgaagtcgtggctctcattgccacttgacgagtcccacggaatacatgaggggtgtaagtctccatagccgaagacttgtaggtttgagtcatatgcctaggctagagtaacaagctgtcccttgattcgagctagaggatgacatggagaaaagcgaaagcaacatccaaaaacttgagagcatgatgtcttcccttccaatctcatggtgactgaaacttcttatttgtttatccaacaccaaacaccgtttgtacagcagagttccaaaagacaaactttatattaatattaagcacccgccaaggacgagaaatctacctaaccagctcccactcagcaacataagcccaacccataccaacacggccaaccttctcctgaaactcctgcgccgtaacaccactagcatccttccgatccccaaagctagtcaacacagccaactgcagcttctgaccaggtgcaccgagcatacgcgcactaggaacatccacataccagaactcaccaccgcccgcgggtccggagcctggtacatgcgtgaaagggagtttgtcgtcctcgcgcccgtccacgccatgaatcataagcaggaacaagcccgcatgctggatgtggctgtggcgagcgagggtccagtgcggacagagaagaccgaactggaagcgcattgcgccaggcgtgctgatggagatgtgcaggccttgtgggtggaaggtcttccggccaatggtgcgcttgtcggcgtcgctgtagacctgtagggcttggacgccatttggtcgttccgggtctgtgagaatatactcttcccaggttatatccgggcgtccgtcctcgcggaaaaactggcgtttgtttgatgggaagtgctttaggccgaactcttcgttcggcattgtgaacatcgacggttcgaatcgttgcttgtatggctgcccggcgccatctattgctcctgcaccccagcaggagtcgattagtttccatcggcctccatcgattttgacggcgttccaggcgtggttgccttcgaatggtggcaccggggcccctggagcaagtgcgttgtgtccgaagcctttgccgtgaccgccgactacgattgcctctaggccggcgtgggtggctaatgctgcaaatagtcccgcgtagccttcgcagactgccagtccagatgcgagggtactggctggcgtggaggacttcacgcaattgttaaagaaggcataggtatcgtaggcaatgttatgatgcaaccacgtaaatatcgcgcgtgccttatctgtcaaggatgggaacggcgctgtcagctcattggccagccacgtcatatcctgcgtgggaagcgatgcacgaggataccgggccgcatggttatcaggacctgagaagtcccggcataccatgcattccgtgtctgaggtgggaggtggagggcttggagacacagccgagccattcaaacgtggctttgaagccataattttggataaatccggacgagagccatgtggaaccggtggtggtgttccattgggggcagctgtgctggatttgggattaccaaacccgagctgcctaggatcctttctttgcgcaggcattggtggaggaggcaatgtcttccggataggtagattaacacttgagtcatcaccagttccatttgtgtctgtgggtaccgcggatggccgacgtgatggcagtcgaggcaccgggggttgctcatcctcataacgtggaggtgactggttaggatttggagaggaagtaggacgaggaggttgagtcggctgcgcaggctgacttggaatagagggaacgggcggtttggaccccggtagcgatattttggaggtcagtcgagcagacaggctcccaaagctcctcttactactaatcgtaggccgcggggccggttccaagctaacttgctcttttggtctgcgggcaggcaacgcaggcagctcggtctcaccccatgcgggcgccttgatgcgattgttcccagtagagttcaccgaagttgtcgatgtgcctcgccccgtagttgtagttgtagctgtcgacgttgtcgaatgtgacgcatcggaagtggctgactcaagggatggccggcgcttttggtccgttggcctacgcggtggcagcggaggacgggctggtgtagggggaggcaggcgatctgaccttcgcgtgggcaatggtgggggggcttttggctttggtttcacttgaggccggagagtttccattggaggcggtcgcaggaccggcctctgagttctgttatctgcgggttcatttccgacagatgttcgatccacgacagagccgactgcatcgtatgagggagggttgttgacggacgcgctccgttcggtcgggcggaatgatggtccaggtcctcccggtgggcgggccagttgcgactggttaagggcggcgatccgttgctggatagaattcaactgaggatcttcggccatggtgcctgagcataatgatattgaagagaaagttgagacgtccgctcgagcttaggtacctcgttcttggcttggcgggggcgaaaatagccttgtcggactctgaaacacgactgcgaattattactgacaaggatagtaggccggttatgcggcttgtcatgtcatttcgtagtcatttcaatagtcatttcataggcttcttggattgtatttttagatgtcttctttaggtatcttctcccgcttcttaagttttgggtagacggcgggaaaaggcggggaaagatttaatttgtgcagatgaacttctttgtataaccttagataatttgattcaactagagtccccgagagaaacacggcgaaagacaatacaagaaagaaaggaattaaacaacaggaggctcaactaaagaggggtcagccctggggcctacccatgggtccggatctatatttggaaattcaagttacggatctacaacatacacagtaaaaacccgatgaattataagttgcaagcagaagatgtttgaatttatttccagaatatcatgattcggagtcccaaacgccttgaaccggtgaagccctcaaaaaaaataaggaaactaggtacgtgcagatggatgaaggaagaagatgaagcaaagaaaatgacaaggagaagggtagcagttaaagaataagaagcctcgagatctccaattgacagcatgcaacccgccagaagaacccgaggccgtgatacagacataagaaaagtcacgtacatcgttggagaaaagaaagggaaattcacaaagtggtaaagccgtgggggtagagggccagcgtcgatcatcagcagcgtcacttcgtcccaatgtacatcatcgtcagggcaaacttagacattcttgtagaggagcaggggctcgccaacattctcgatctccggaatggtacactttagatcgaatgccttggctagaacgatcttgaagatctgcagtgggtcagtatgtgttctatcagacttggaataaaccgagcaacagggtgtggacggctgcaacttaccttttgcacattgatgctatggctggtgctgctaaatatcagactagccttcatagccttggcaaatcgcttggcctgcaaatatgttagtaatcgcggaaaaaaaaacgaggatcacacgtacctggatagatatctcctcctgatcctcacggggaaagttcacaaagtgatcatacttggtgcccaccaggaaggggatggctgtcttattgaagccacgtccctggcgataccactccttaatcgaattcaatgtactcttgcgagtgagatcaaacatgaaaagaattgcaacagcgtcattgcagacaagcggtagcatattaacgaactcgcgctggccaccaagatcccaaatcgagaaggtgatttcagtgtttcgaattgagattgtcttttccataaagttgacgccttcacaagtccttggttagtaaacagagctactgtagaacagaaattcaacttacctaacgtctggatgtaatcctcgtcccagctgccctcgacgtacttgaccatcaaactagtctttccgatctgcgcatcgcccaccataccaaccttaatcaccacactgttcttgttagcctgcgaggcttggcgctgaccggcgtcttggtgctgcagctgggaaacaggggcccgttctggaccactagagagtccagatcctggcctggagttgggaacaggtagagggtggtggctgagcaatggagatgagccctggcgggactgatcagtatcttgggcggcgtattcgggagcagattgatgaaagtcggtcgatcgggagtggtaatgcgccttcgaatcgctgttatagccattgttgatggccgcacggctaatggtgtggtcggaagccggctcttcggtattggccgagataggcgcaggctgttccagaggttggtctaaaggttgttcaaggggctgttcgggcgcaagctcctggccctcctgcgcctgttctgtctgatcctccggagcaatctgctcggattccgcaacgacaggaacagcgggcgcatccaccccaggagcaccaagagggtccaaattaggctccatgacgtttcaagatcggtttcggtgtagaattcagagaagcaacctgccaacaagttctgactgtcagcatatacgcgcggggtgaagaagctcaagaggggactaaccaatatcacaacgggctgaaattccagcgcaatctaacgagattgcatgtgtactgcctcaggggattgattttgagaaaattgaagaggccgagctgtgttggttctcgggggggtcagcggacaagggttgtccctgagtaaacagaccgaattgggaggggtgacggaaatgcgagtcaaagcaaacaaacgcaggaaccaggctggaaataaacgtcaaatatttgactccttcgaaactgcggggcctaggcactaaataagaacgtcaaggctctctctggtgtaccttcagctcgagggtgggcaactgggatcttacgctaggccacgataggtttagcgccgctcccacgctgttgccaaaatttacgggaaaaaaaaagttcttatcgcacatccccctcctcggtctcgacacccttataattaacactttttacgggttcaagatgtccaagagaagcgctgaagcggacgagcacactgccgccctcaaggctggcgagcggccaattgcagatgccccaatggacgaggcgggggagttcgaagacgagtacgaggatgaatttgagagtgaagatgagattctagaggccggagtggatggtcgcccagatgctgagcgcgaggaggaagagaagggtgcgcattcttcaatcctcagcctgttcaactgaactaaccttgtttaaatcttatagaagctatggatgtcgacaaggagactttcattcctgggcgaacaaaattggctcccggagagacactatcgcccgatccctccacttacgatatgctccacacactcagcacaccatggccatgcctttccttcgatattgtgcgcgattcactcggtgataaccgcaagacctaccccgctactgtctacgctgttactggtacacaagctgagggctcgaaatccaaggaaaatgaactcatggtgctcaagatgagcggactgagcaagatggagaggggaggtgaggattcagaaagcgactcggacgacgacgacatgggcgagcccattctggagagcaagtcgatcccgcttggctcaacgacgaaccgcattcgtacccaccagaccccctcccagtccggtgattactccaagcccccgcagacccttaccgcgacctggctcgagaactcgcaagtcgtcattcacgatgttaccgcccacctttctagcttcgatgttcccggcactattcttcctccttcggcatctaagcctctttccaccctgcgcatgcacaagactgaaggatatgcattggattggtctccgctccagcctcttggaaagctgttgaccggtgacaataacggattgatctatgccaccactcgcacagaaggtggcggctgggttaccgacacccggccgttcacaggccatgcttcctcaattgaggaattgcagtggtctcctaacgagcgcaacgtgtttgcatccgctagcagtgacggtagcgtaaaggtttgggatgtgcgatccaagtcgcgcaagcccgccgtggacgtccaggtctccaaaaccgacgtgaacgttatgagctggtctaaccaggccgctcaccttttggccactggagccgacgatggacagtgggcagtctgggatttgcgtcactggaagcccaatgccgcggcgccttctgcccagatcacctctacccccgttgcatcattcgacttccacaaggagccgatcaccactatcgaatggcacccctcagacgacagtgtggtggccgttggctcggcagacaacactgtcacactttgggatcttgctgtcgagctggacgacgaagaaagccgccaggccaacatggtggacattccttcgcaactgctgttcgtgcactatatggagtctgtcaaggaactccactggcaggcacagatgcccggtacgctcatggcgaccggcagcagtggattcaggtatgttatattcgttatcatgcggttgagccaagctaaccagttccttttaatagtgttttcaagacgatcagtgtctagacgaagaaaatgtatctacgctccgactaactcgggaatttcatgtgccatgtcttgctcatataccattcgaattctgtggattttttgctcctcaatatcattatgctcggagttagaccctttccttcagatggtcagggtggtgaagaaaaagtttttgtcgttatatctggcatagtaaatagacagatcgcattatcaatgaggttgatatacattctgcagggatggtacttgacagttgacagcggaatgatccaggcaactccgcctcctttgacagggcaattctgcaatgcaaagcatcagcagagcatatgcagcggaaatacccctatcactacttccacggacttatccaaagatgtgaactcgctatcctcgcctattcaaaacatcaaacatacaagacgttggcagggataacctgcacatgtgcaaagtcacaggatggaccgtgtcagatcgccaatgcgccattaattactccgtacagacagatacatatgcagcctattacatgcgacgtgacctagtacatatccgtagcctttcggcgctgacttggcctggggccgagtcgggcgcgacgaatgggccagtcggctcaatgattctcgacgtagctgaatatctttctttctttatatacggagtttatatggacataaaccgataacatttgaaatacagaatcaaaagtggtacggatcacaatacacatatgttgtagtccaaggttgcgaagctgttaggcagatcgacttggctgcgcattgtggcgatgtgggatgttttctttgttgtcaatgcgaaaagacccactcgacggtgctgtattggacgattattgtatggatattgcaatgccatggcatacataagtacatatggagcctgtggagtggattaacgctctaggtatgacatgcatgaattcgaatggagactgttgcgcgcatttgtgtcagacggatttgactgttgtgcttgtgtttctcggctcaagacatcggagtcaggtgagaagtatattatatagcgtgtatatacctacatgtagtagtctatactgtctatgtgagatacctcggttgtggtgatacctagaagcagtgcgtactgtatatgtattcagaaatgtaaatctaataatcgtatggtacctcacgctagaaaaccaatcgatctgatctaccggccaagtctgctcctatccaatctggaaaagagcattccattctctctcgtcatcgtgcctcgaataaataccgctaatgcacgcccgaatccagcccaatcacatcagatctaacttctgtcgcgtttgcgttagcagagcagaaacataagactaaaatagctccatttttgcgacatcggcttgttcgccggtcgaataatctctccgatatcactttactatttgtcaagtccagcctcttttttctcttatcggagaatcgagcggtctgttccgccggtaatttatgtacagtactgaaagaccatatgatgtcgaggtactgatgttattgccctataacataataacataatgttgcattcgatgtacatgtgtacattatagttactgggtacactccatactgaaactaaatataaacatcttcatgtttgatcttagcgctggatcaaccccaggactcgccacaaatgctcttcatttccttgatgaaaagcactgttcctgggcaggtccgaacacaaccaacgccgtaccatggcagcttctccgatccgaccttatacccacactaaaccttgatcgtccacagggactcggcccatccagtcagaccgcgagcctgagcgcctggcgaggtagctatttgcgatctgcttccgatgtagtattgctacaccgttctccgtactccgtactatccactattcggagacatagcgtcaatacggagtactccgtacggagtccaatatccaatatccaatatccaatatacaaaatgatagctaggcgtttgttatcgtcaatatacggtgtcataataatgatatctggagtaatagtccaggccgtatcagccaattgttcatcgccgggcccattgctttatccaggcacatggccgagaactgcgcagatcaatcgacaatactacgccgtaaagaattgtgtctctccatagctcgcgggagctccactagcctccatatcttctatccactccattgctatgaattgtcattgcctggattgcgattgcgtgtttcgagtaaatatgtggccagttgatcgtgtgcgacatttgacttggttctggccgggatgcattttcgccaattgccgttatttcaggccttcggtcccctcgatgtcccggcgctgatcatccgtgctgtcaccccacgtctttttgccgctcgatctggaatggcgtggttgacttggtgcctttttattatgattcatggttctggtaagtcaagatacataagaagaatacaactgtggtaggtccgataaattcaaccgagccattcgactctcgagttcggttgtctgtattaacggtttcattgtggacctaaaatgacgcatggggccgagacaagagcctcactgtgcaagagaattaaacagagtgacatacgaggcgaactcaggcacaccgtattcttctttgggctaatctgattaaatcgaggtcaatccggaaggaatctacgatatactgttaaggtgcgccaatgacgccttatcgactgagtactattcttcacagaaataaaccacccaacccgggtgcatagtcacatatccgatgagctacccggtaaggacaaaaacaaaaacaaaaggcccggctgaaagtccgatcaggggtgtcaattccgccatcccgcattgatgccagcactggccactacggcccccccatgatacgcagggatgggcggagaatttaagtgggacgttttgatagctagacattgcctgagccggtgttttatcggctgtaatttattgtctcgatgaattactgcgtaaaacacggaaaagggaagttgactgcgctgcatgttatatagtgtatattgtcagatcatctgcgaagcgcggttatgcaatgacgtttggtggaatcggcgctcgatgtatggctagcgctcatacaaggatgcccttgttcgctagtatatatgtagtgtcaagtgtagtgcctaagagtgcaggtgcagtatcatcgcatgattagggccagtggcgtctgcccctgagttactgatgagctcatgacgaagcgatggatttctcaatgaggacctgcatcagaagattggttggaactgacggatatcggcgcaaggctgtatcctggggttaaatctgtctatttaggctatatggcatttacgaacggcttcgctgcgttgcgtaaccagtatcagctgtgttcaacaccggtgaagtatgtttgggttgaggtgtacgatgctctaaatatctagaggagacatgtcttcgccagaaccaatccccttcatctacaatatagggctttcggatatactccgtggctcaatgtcggacatatcggatatattgctcacgaggtcaacacggcaattacattatacttgcatggacgcatgcaaattattggaaataggtcggatgcctttagtatgtcgatgttcttaaggggaaagccagacccttgcagcttattcaccattgggatagtccggatcaaccccgacatcaacacagcttagagacagctcactgcgtcggagctggggagggtggcttgcggcactgccatttcatttgtcaaccacccctcttgactcatctcgggtcacctgcagcctccttagactctccctagtgtgcaactagtgcattgtcaagtccgggggattctgcaaaagaggtgtccgtgcgaccaaatgcgagtctacaatgtattccagacatggcgagggttggaaaaaacagacaaaggaaagttgacaaagaagcgttcatagccgtgtctgtgtgaccgctttcctctttgtctgcatccaagtccaccttggaatgaccccaaagctgtgttagcaccgagatactggatcgtcaccataaccccagatccgacaccgatccgatggggtcggctgcacgcccaatgggctagggtgcccatgctcgcctcgttccgtgcgacccaaactcaaaacggcgtggcgtaacgtggacaacgagtccttacagcgacgggatggagattctagaaaacgctcgaggggcagattccggggaaacccaattaaaagtctgggggagccaaggacccgaaaaaaggaaagaaacaaaacgaccccatccaatgttcccttcaaattacaacccttcgccacgccagaccatgtgccatagggaaccggaggatattccttgtcggcacatccaattgcagcacagccgtgcgtgttatgtacatattccgttttatgtctgggggaattccccacacgaacccttttttttttttgacttggtctcccccacaaaaatggcgcatggatctttccgcttgtttatacccggacactccgctctcgggatggattctggaatgtttcgtttcgatgtcgaagtgagccttggaaaggagggaattggaggcgaatgggaataaaagaaaataaaagctgatagaccggtcacgagttctatactacatatagattaccattatgataaaaacgtgtatgagcttgttatgctcagtaactctcgggcccaccccgatacttccaggaggcttagaggataatattaaataattaaaacaatatccacccggggcaggaatttggttagtgcagccgcgtattctttacgatatacacacctgggcagttatcatcagttgatgcaattcagttgaaaccccaaattcccaaattcccgaatgtccgaattcctatttaattcaatcagtcaattgcattccagagcatgcaattcatgtttcatgaaacggtaaataacatcgtacgcaaataacacaatactagtcaagtctggcgttacgccgctagtcccaacacggcaagtacgtggagaccaatctcgttgataaccagagccaggaactggtggacatccggtagaacgtgcgtgtccgtaagattcagtctacgccgcattcggtatcaccctagttaatcgtgggggcatcattggcagagacgatcagcccgtgtgtcggggatccaccacctgcgctctgtatcggtaccgtctgctgactcgtccgtcactcgtctgctgtgcggttgtctgggcctgacatcgccctggttggtagttgcctcgtatgtaccctcggtgtacctttgtcctcggaccctcttatcaccggtacctccagagtacttccccccagcatttcccggttcctctctacccgccactactgccactgccaacggtgtatgtaagtaccctggcccaggtacctctcgctctgctgtagaacgactctggatactcaaccttcggaggcaatttcgaacttcccaactacttccacctctcctgccatccgtctcttttcatcatcgtcgcttccccggtgttgtcgtgggttctcattgcttatcgacaattgcctatctgcactccatcggttatctttggcttatccaactctctccaagttgcgagatcaattcgctcaatggatgcccgagtttaaaagcatatacaagtcactgctttagctccgccagtctgatgtgagtgatctgatcgaagtgcgatggctgagtatcattcatgttggtgcagtccgctgatgtcgccgattacaaacagacgtcaagcactaggctccataccatacccccccccccataccggtctcaggtcctcataccctgcaataatcgaatctcattcaacctcttctccaaacacacgccgaatccttcgatagaccgactgtaaatttgttcgccttatattggtgggtccccttcatctatctcacgacaaggttcctgatagcctcggtaccttgggtcgttgtgatagcaaccctctacgcatcatgcaagacacatgctgacttgatgtcatttggatggaacagtcgttgatgcggcacattgtacaaatttgaaagatcaaatatcgtgcccgacgcgatcttcgttccatcatacgattgacgcaacctctctttcttagcaatttcccgagtcgcaacgacttcgccacctccgagacctgtgagcaagactttggtctgtgaggagtttccaaagactagaatgctattggatgctatggtcggacaagatcaggaccataacccaaaagtggtggaccttgccagtatccacgaaattccgggaaatatgcctggtgagtttcgcaaagacaattccctcggtgcaattcttaccatatgtagctccaaaggacgcaaagaagcagaccgacctgagcggtcaaatgggtgccaatggcaacatcccgccccctaaaacagataagcctcggccccacgtctgcaccacctgcggtcgctcatttgcgcgattggagcacctcaagcgccatgagcgctcccacacaaaggagaagccattcgagtgtccggactgcgcgcggtgcttcgctcggcgcgatctgctcctgcgacaccagcagaagctacacatgaccaccacgccatcttcccgaccgagaaacggtcgccgtgagagtacgggcgccgcacccggtgctaaccgggttcgcaagaattccattgccaacagttcagcttcttcgatgcgcccgagggccaacaccatcagccacgttgagggggcggcattgggtatccccggtgccggtaatccgtcatctgcgcccacccaatcggctcacgcatatcaccccagccttagttcttcggtcggctcaagtatggactataggggattcggctctggacacacttcgatgaacggcctcgcgaagatcgaaacttccggacttcctatggacatgtccggaggacttcggactgctcccgtgtatgggagctttgacacgggtatcgatggcatgctgatgggccacggtagcaccatcaacccagcgcaattacactttgcaggatccccacaaggcttcaacgattcgccctcgtctccgttcggtcactatcacaatggactttcaaccactgcggatcccatgatggatgaagatatgcactttgactggatgaacgggtttgacacaggcatggttatgggaaatggcaacgactcagtcattgacgagtcatcgccatccgcaatgagcacgggtagccaaagcggaatcagcgaggccatgttggatggtccgaatcgcattcctatctctaacggttggcacaacgcgttcactgcccaccacccggccaaccaattcgccctcgacttttccccaacgacgttgaacgatctggggttccccccggagacagtgtctcccaagtctctaatggcccagaatccgttttctgagacgtacgctacccccccatctatgacctcggtcggccagcccgtcatgggaggacattctcagagtatgtttccctctatggcaaccaacggagaatctcctaatcctctcaacgttcctttcccgaatagtgccctacgaaatgaacattcaccagtctcaacggatacatttacagactccacacgacaggctctattagcgagcatgtcgacccccactggcttcaatcatcgcaagtattcccagcccgcaagtggacttctaaacagtcgcgagttgttcgcccgttcgactggcttcaacagctccagtcaactgcccagcacctcggacttacaacggtacatttcggcctacatcacctacttccacccccacatcccgtttctccatatccccacgctcaatttccaagctccccagtatacaaacaacctgcgcacgccaagcggacacctcaatctcagctcgaccggcgtcgctggaggcgggggttgcctgatcctctccatggcggctattggtgctctgtacgaatacgaatctgccgcctccaaggatctcttcgacgccgcgaaaaagatgattcagttatacctcgaagaacgacgaaaggccgacatgtctgctgctctcaatcgttcacattcctcccgcgatagctcagtacacaacaccccgctttggttggtacaagcaatgctcttgaacgttatatacggacacacctgcggcgacaagacatccgcagatattgctagcacacactgtgctgctttggtcagtcttgcacgcgcagccgaattgacacatcacctggaccccaagaacctgccgcaagatcatcttgttgctggtaaaaatggaaatgattctgctggtgactcggaaaactggatgtcttcgtcgtttagtcaaccgaaagagcgccgagattggctgaattggaagattggagaggagcggaaacgtaccctctacgctatctttgttctttccagctttctcgtctctgcctacaaccattcacctgcactcacaaattcggaaattcgccttgatcttccctgtgaagaggacctttgggcagccgaatcaccccaggcctggaagaagatgggcggccaaacaaaaacctcgtccttttctactgctttgacgtctcttctaactgccagccaacgagagcagaatcaatcggcgaacttgttccacaactctgacgatctctctaattctgaaaaccgcccgagtactttcggctgcctggtactcatctactcactccacaactatatctgggagactcgccaaaggcacatgggccgacaatggacaccgcaggagaccgatgctatgcaagcccacatcgagcccgctctacgggcatggcaagcagcatgggctagcaaccctgtccacagcctagagcgaccgaatccgttcggggctggacctttgtctgcagacagcatcccccttctagatttggcctatgttcgtctattcgtcaacctaggccgatgcaaagaggcgttctggcaacgcgattggaatggcatggcggatgagctcgcacgtggtactgagattttccagcactcagatgctgcaatgaacgacgttgtcgatccgtctctcacgggtcacattgacgtgagacgagactccatcgccgatttaggagtttcagatctagccatctccaagacaccgacacaagatgatcccatgcatgctctctccaatatatataagatgggccaacctaagcgtgaaaagcacctgcgcaaagcagcattctacgcagcagattctatatctatgtcggatcgtcttggtaacacttttgccgagttctcgtcgcgtgaactacccatccagtgcgcgttgtgtgctttcgattgtgcacaggtgctcgcggagtggatcactactgttcaagaacgggtgggcccctaccttggtatccttggccgcgacgatgtcgacttgactcaagtacctggagtcatgctattagaagacgaggactgcaagctggtggacaagatcaaggaaatcttgcggagtattgagatgaaaatgcagcgccagtaccaaactggaaattccatgtccgcgctgagtgctgtgcaacggctacccagtcttgtggaaggaggatacggatgtaaaatattgattgcgacagccagtcttttggaacgagctgctgtctggccaggttagtttcagccatctccaaacttccacaaatcaaaacgattctctaacacctacccgcagtgacgaaactgatggcccgctctctggaagcccaagccatgcgaatgaaggagcgtaccgagcactccgtgatgatgaccccttaatgaccattcccaccaccatatattgcccccatctctccaactcctatttcgcattcgcgcgcgcccgtgtatcatgaataaacaatccaaggcaacaacaccccttcttcccatcgaagcatgtgtatctgcaccaataacccgcacccgttccctccctctctctcgcaacatgcgtaccgcctttgataccctgctttgagactttgattatctgtgtcatagacaaattgcctgctcatgtcatttcatgtttctccgattgttagcgttcttgctttttgtaacccccgactgatgtccttgctgtggtgtgatgttgaattggagtgtggaaatttctggtttcctttcctcgacttactgacttcggtcgaggctgagatttcattattctttcctttgcctgtgcggtgtttgattatccagaattatacttcgtgtgaatatgatttacctttcttcaagggttgctgttagtatgtaaactgctagatcacgatctatatatgccaacttgcaattagaatggttatagctgctctgtaatttcgtcatgatcgcaactgctgaagttgggtgcctaatgtattcaaaagtggtagaatactattgggtaaaagtgacaaggggtcacgtgaatgaaaaggtatttcggacaaggatagagcaggcgataccgccatcgtccactcctgcttttggccatgagctcgtctgccaagcgccctgggcgcctcgggggcaccaagtccaagaccgggtgcgatacatgcaagtcagttgccccctagaaagtcgattagtagccgtatttgacatttgattcgcagaattcgccgcgtaaggtgtggagaggagaaaccacactgcctgagatgtactagtacaggacggcggtgtgcctatggcgggggtcatgccaggaccattatcgggcgactccagccggacatcacaccctacacaagtcagggatcgcgagagcgtcgttctttcgaattttatttccaccaagctggcccatcactttcaggagtcctggatcaggctttctggagaggatccgtcctccaaatatgccgggtagagccacttatctgggatgcgatcatctcgcttagcgcgctctacgagcgacctcccatttacgagacgtcgccgtggtcgcttataaatgatcccgccgcggtacgacatgagtaccatcacgaagcgctggtctggtactcgcgctcactggctcttctacagcaacgtattaatcagggcacggcggacctgacggtgtccttggtcagctgcattctctttattgccattgagcttttacaaggaagccgcaaagctgctcagatcctgtacaaacatggtgcgcagctggttttcagtgcttcgtcaacagcgacttcgactattgcaaccctcgagcctatctttcgccgtctggggacatgggtcttcctcaccaatggactacctgaagaaagctgcgatcttcatttggctgttccagacgagcaattcaaatccatcgaagaggcgaggaacgtcttgtgtagcattgtagccgaaatgaaggcccttaacattgactccaaagcttatatacaccgaacagcagatggccggctgcacgaggtatcggagttggcggccagacaacagcacctgaaaacccgactcgctcaatggtatcgcctctttacagacttgaaccctatgcttacctcgaacgtcgacggtgcaactgcgcttcttctaatgacatataagagtgtcttcatcgaagcagaagccatgctgaaccctgatcaaagtgtatatgacgcctacgaatctgaattcgcccagatcattgacctggcccccaccgcggttgcatggacacgcagctcggaagggaaacaaccaccattcatgtttgagatgggcgtgttccttccacttttcataacagggctcaaatgccccttcccacaactacgccgccaggcgttacggtacatgggggaagctcccccggcacaagggctgttcatgtgcactccggccgctcatatcgtggccattcttattgggctagaagagaaccccgacaccatgccagaaaaggtctcgcaggtatatgagctgctggccaaaccggggcatatcccaccagcccagcatcgcacatgtgattttagtgtgtcgtcagtcatggataggcatggtaggacgcggaatttgttgaattatacactttaccattttgatgatgagggaaggatacaaatcgtcgagaaaacgctgccattccctgcatgaggtcatcagctttaatattttttatgataatacgatctaatctctgagaacacttctacaaagactactagaaaagactgtcgtctaagcgcagagtatgtattcttgctctcttttagttcttagtatatctaaagtataattctttatttattcaatccgcacgacctcgtctagtagtttgttttatagaaataaagagtgcaaaatgattgcggtgagccaggcggtcaaggcctactatgggattaggggataaggtatgatgacataatatttccccacccgtgggtctcaaggttgctggggcatcaaacgcgttaagtggtttcgcgaaccataatctctgctatatctgcctggtatcaatcgcacatggccagtctatctctgtgctggaaatgaatacagcctccaagcatccacctaaaaccctcccatcgcagcgtccgacagccgcggcttctccacccaagaattaatgtccgctcagctcgaaactcaaccccaatgccctatccacggcctgtctccccggtctctctcgaaacatgcccgcactcatcctcggagatagactcagatgacctgattgcctcggatgatgagttggatggtgctgcccgagctgcaaagcgtcagcgggtcgagaagttggcggagtcttatctgcagggcaaaccgctgtttattctctcctcttcgctccgaggcccgcttgataatggatgggcgaatccatggaagaaaaacaggacacggggtactggcgcagcagtgaaagctcgccagaaaaatgttcccgagccggtggtcctggaaactgatttgcaggcctcgaaataccgaaaggatctatcagttggtactcgtcgtccggatattccagcgacatcttggaactcccctaggatctctgtgcaaatcggagaccgttcgtcaccctctaaatcgccacggagacatcccaaggaacccatcccgcgctcggggcatactgggcaaaatagagcgttgcgacggtctcccatcaaatcaaaggaaccgccgtcggcgacagtggatgaaccgtcgttaatgccgcctaggacagcggattggctgaagaaggatcggaagctcatgaacttcaccaggtttgaaccgccgagctcgccaacaatatctgttgcttctcgtcagtcggacaaagctggtcgactggcaccgcgctctgttcaagtccaggtcccacagacgccggcatctccagaaaaatgccatcctgtcaagcctgtcctagcaaagacagctcagagtgctcgtgtgaactcgaacgagcacgtatccctgcggtccattcgggccaccttgaattcacctaaggaccctactgttccttctcatttgccccgggagccgtctctccgaatcgttgattcttcctctcaactgccgaggtttgaataccggaggtggccccgtgaacgttctagtcaacagctgaagacttcccctatgcgagatgaaagcatcttgcaagaagagacttttatacaggaggacagccctctgaaagaaaaatccatagtcgatctcgaacctgccagtcctagtcccgctaaggatcaagcattggatcctgctgaacctgaacccgaacccgaacctgaacaaccacaaccacgacctagaactgaaactgaaactgaaactgaaactgaatctgaacctgaacctgagcctgaacctgagcctgaacctgaacctgaacctgaacctgaacctgaactcgaacttgaatttgaaccctcggttcctgaagaaataccagttcagaatgaggactctatcaagaaagatgcaagccataagaccttgtcgaaagaaactaggtttgcagatgaggatgatctcatagaggataatcttggggtggaggaagccgcagcagaaggtgccgccgatgcagaggctgtggcggaagatgttacaaccgagaaagatatatcgacattccaaaacacagatcactctggatcaactgaacataacacctacgatgatctcccttctgcccaacaagtgccaccccccttgggagtgtcagaccgggtaacgtcgcttcactcgacggctttggcaagagtagacccaggacaagactctccccaaagccccgatacccagctttcgaccctggctgcccttttgcatgcccagaggtcctttcaagacgacctggacagtccagaatttcacgctgagacaccggattcggaccgagcagtgcattcacccgatgcttcacttcgctcagccaatgtcactccattctaccgtctagaagagtcgattcgacgtgatctagaacggagttcaatatccaagaacaaggatgggatgcatgcaatgagcacgcaattcatgctcgatgcagctacacctttcaatttcagcactgagcaagctggtcaagatcggagcttgaaacccacgaacagaaatatgacgcaagcaatgaatacgcagttcatgctcgatgcagctacaccctacgcttttagcacagagaagagacagcgtacatcccgaccagactcaggttcacctacggcgagaggctccaagagaaaaagaacggccaatatcggaagcccttctccttctattaggagtcaatcaacatctgtcgacaacgaatatcacactgcggaatcccaatcaagcgaagatgatgaaagctcacgatcagtggccgagcagttggaccatcaattaacttatcaatcccccacagaagctgcgtccttacccctcaccttaagcgaatcggtgccaacaacaggccaggatggacaaggcgttcgccagggaatggagagcttcaacctcagtcaggcaattgcggatgctggtagttggcttcaacaaagttttgatttcatgagcagcgctcggccaagcaggagtttcaacgcgattcctacttctgacgcgcgcccttcccctttaaacatggatgtatctcaataacgagaactccttgatgctagcgactaagttcctcacttcttggtcttcccatcttcccattttcttatcttccatagcgtgttgagagcttcagcttggtagcgaagctgttctggacatgacaagatcgtatagatactgctcgaccacggagtcaaacaatctgcaccctatcaatctcctttcaaagggtttaaaagactataagacttacagactacacagcctactcaaatggaaccatacttcctttattatcaattcctcggccatttagataacggcgctatgattctcgtcattggccatgagccacttaatgtttagtcatcggcttgaaagcatcttcactttacttcataactatgtaccggataatggacttagtcatgaattccaatatcattttcggttataaatctagagcaacggagacgcaggtgtcagattccaggacactctcagagaatagactgaacactcggccaacgatactcgatataaagttcggagctctcaatattaaaacattcggctgattgattctctacactagacttactatttttcttaccgcaaacagcatctttaatgaggagagaagggcagccttagccatggaaaacggaatattattggtagttgttgaaacaaacaaggggcaatatatgattcaggataggcgaccagaatactagcgtattacttatgagattgaagagcatgctataggaatataataatctcgaaatgttttgggaaggacttttgtctgaaatctgttagctaggaaatggataagaatcgaacgcagccagttatctcagtcctaagctgcccttaaggactaactcagactatttattctgctgagcgaagaataagtttcgaaaccgttagtattctaagtttgtctctacctaactattccgttcgaataaaacctaatgtaacattattatatagattcttccgatgccgcagaggacaatgacagcttgctataataggaagctatcccaaagccaggcatagaaacgtacgcctttcagcatgggaaaatccaagaataaacagcgattacatgctatagcctgaggcagttggcagtttcgaagtccggtactattaaatgcttccgaaataaagatagttggcaataccgagggaacatttcaagccactacttattaggacatgtcttatgtatgcttgatacttggactctgagttcgcgacaagtcccaaaggcccaaatgaaagatgcaaatgggctccattcttatataaagggcgtagttcccaagagactacgcaggggtcctttggctgactggatttaagtaacatgaccttctttgagatctgagagggaacagacccgtgcttgaacccccccagtttgatgtcacctactaaaattcacttctacttacatatgtttaacagatacgtccagataaacgaataacaagctgaagatgaagcagattgttactcactctagatcaaagtcaggatgtttgagaatttttcagtgttattgggcactctgtcgctcatcacttcttactctgttcttaaccgtttgttctttgccgtttgctgttcacaaattgttgctgactatttgtactcgacaaacaatttcactgatcattgggacatacaatagagcaaccaaaccctcaataagatctcagacgtgaaccctgcgagtcagttctagcttagtaggctatttagtataagtagtattaagatacagtgaccataaagtagccatagtatccttaccgatatttattaactagtatagaataagatgataaattaggggacaaccgttatcaaatttagaataataaaaacgttcaaccaagcaacctttggcctaataggccgaacaaacagggccctatggttcatatggggtaataggaagcgtgcatgtacagccaaggtcgcggttgaaacggttacagttgttaaggagcgctgttctactgttagtaaaagttcggagatctaccatgacgacctcgggagttagagatctcttttataacctagacattataagtaggtaagtataattaaaccgtttgcatgcagaatatgaggacctgtgaaatcgacgccgaaaatatcagcttttgacgccagagcggctatagtgcaatgcacattaatatacacctatagattttgaatcatgcaagtacttatagaaaggggtgctcgttgacttaccagcctgcatttgatttttgctcaacatgaaattagttgaggcagagtggttccagcatgcctcatttgggcagacatcctcaccaatgtttctcaacacttgtcatggacagacacggctgagctggtgcaaaacgatgcatgtgagcaaccagacaaaccgaggagtctacaaataccgcccgtaagatcttcgtgccactggatctctacattttctatcagcaaatccattggaatgaaacaagaaatgatcctgccttgaaagagcgtctccttctcaagattgtatcacgcatgcgttcgatcgtattacaatctctcttacaccaatttagatatgcaggtcaaaattccaaaacaaaagacgtttgctggctcatacggtcattggacggcttaaatacagtgctcagtggcgcccttgatcacggcgaacaccccgaaggatatcgcaatcccggaaatcaatatcacgttcggataccgatccccatttgagcttcctggtccaaggcctaaccaaaccagacttcccacacggggcgagtaggcctagggcgcagcctccgtagccaatattggtggattgctcccttcattgcggtattgtcctggtctcgactactgcgccatgtgtcttggacttccgaggcgctgtaccttgcccttcatgtatcttccaatttcccggatcgtcactgtaaatacctcttttcccacccccatcaacctaaaaacgtcctcaacagatgtgccctctgcaccctactctgacaagttcaacatcttgagagacaaatcccacaacttcttctcgccctccggatcgaaggcgtgtggtgcaacaccgaccgccagtgtaccaccctcggggaccgggccagcttcctggcaatcctccagatagacaccacccttgccttcccattccttaccaagtgcagccgttatggttgtggcagcgccctgagccgagctcttggcatacttttgcgcaaactcacttgaaccccactccttcaacgtttccgggtcgacgtggcgctgtaggcttgtggcaataccaccaggcatcaacgagaggccgtgcagaccctttgacccgtatcggtgctcgatctcgttcgtcatccaaatacaagctgtcttggcattgccatatgccttccacggctcgtactcaccctcaaggttaatgttgtcgagcacaacagagctcatgtgatggccggcggaagagacgttgacgacgcgggattggaactcaggtgtggaactggacaagagcgtctgctcgagtagcttgtagagaaggaagtggccgagatagttgattgcaagctgcgactcgaagccgtccactgtcttcgcctctgggcatgccatgatccccgcattgttgaccaagacattgagctgggttgacttggacagaaaggtcttggccgcggtgcggacgctttccattgagccaacgtctagctcaagcagctccacacgaccgggttcaagtatctctgccagagcttgctttcccttctccaaatcccgaacgccaagatacactttaccaccagttgcggcgagcgcacgaccagtttcaatgccaattcctccagaggacccggtgagaagaaagacctgtttatggtcaattccagttctggtcttcagcagcagcaatgcccaccttgtccttcatgttatcgatccggtcgttgtccttgagaatgtcaagagctgtaggtcgagcgtctccaggcccattctgctccaagaaggcctgagtgtacttgccatgcttgccaatgtgattactaatgagcggattggccatgatggtgattgtgatgatggaggatagctggtagattgagtttgcaagtggatgctggggagaaggtgtatgtctggtggggctttatatagggtgcgggggagagcgtggtgatggggtgacttgcactggcacgacttggaacatgggtccagagctgaaagactgttcgaacctcggactttatttcggattttgcttaagaccgtttatcgggcgaggatattcagacagatccacattcagtactatacccgtccaattaagattaactccatcagccacgatattgggcttaaatccaccatatgaccacatcatcgttatttaacaaagaagaagggagctgaaaatgtggtttcgtcttttttccggaataggatagcagccgaaacgaatcgccaaaaagaccatcgggataagcccgagtcgggcaagcggggagacaggaacaaagaaacccctgttggtcgggctgccttgatggctccctaaagaggggcctgaaccctggcccccatacgtcttcggaccctaccaggttacctaccatgagaatgcatgcctggatgattcaagttagaaggcacttgaagcgcctcaataagtacgatgacatatgccttgataatcaaagtacccggattctgctggcgtttgcaaggccaaaaatgaatcttttactccatatacaccatataaatgcggactggcaaaccggtaaataatctggagatacctacatctgtatttagtccataagtttcattttttggacttgcaaccaccggaataatggagatacctgatttgtatggtgtccaaaagcttcatctaggcaggttgatgtattgacaattcaccgtacactgtattagggcggtatagaaagcagtactaattcaggtatcaaggcatcaggattcccctaaaaagggggtttgagggtcgcacaatgcatcttgcttaagcttaatctgtgtaacgcgcttcatgcttatatctattcttgctgaatctatacatttagttgtagcgacgcgtggtcttgctccactgctcattgccgctcatctggtactctaggcccttcatatacgccttggcagcttcagagcagccgtctggggatgcgatcttctctgccacgatctcgtcatgcacagtctcccactcccgagtcatagaccaaagcacgcgtttcgttgcgggtataccaagcttggactcctccgccagaaccttcacagctgaacaaaggaaggctccctccttgtgtccagtccgagacgcttcctcttccttgtcataactgtatatgtcattgactacagaaagctgcttggcacagttggcttcaagggctttcatatcctgaagctcatctgcactgagtctaagtcccatcgagaatctcattagagccgaaagcaacctggccgaacagtcagtatcacgagctcgaatcctgggcgagaacacatacgccttgcctacatccttctcacggtactcgagataatgccccaattcatggatgctcaaacgcgctcgatctgtctgcgcgcgcatgaacacgaaagtcggctcaagaacttcgttggccagctccgcatcatgggcgcgcatgctttcccagaggtcatagagaatgaactcttctggcttggttcggtccgggagcacgtctccacgcgatatcgggatcaatctgttgttgtaggcttctccatccgcgaaagacatatgctcaagaacatctaccctcgtcagtgaaggctacattaggccatgtcctttcgcactcaccatcgataaggaagagaacggtcagcagtcggcaggcaaagtggatgcgatcgtccagtgcaagagggaagtaaagacaagtaacctctgagaacttggcatccaagaaggtgcgaacagccttgaagctgggaaatttccagttctccaggaagtatccatcgacttcgtcctgtacctccttcactcgtggatggcaaaggtacgaccactgagtaggaggcggagtgatcgtcgtgtcatttctgggcctgattgtctctttgaccagagggctattgatagggttttcaaggtgcacgaacggttgggccagggaagaaatggtttctgttgaggtagccatgtcgacgctcaccgggtttgaagggttatactcgtggataacagctttcagtaagtgcgaggaagcatatcgtcgaaaaaataccagacttcggaaactcgtccagtcttatcaggagctcgaattgatcgtgtacgtaggactccgacgacctggatgaaactaattcgaactgtcacatctggtgttctttccgagttcgcgcccggtcaataaccagctgtttcgatgtgtcgggccgagtaccgtatgcatttgcggatttaattgggaaatttcctaaatcggcaaattcaggtagagcgccctcacaggaatagtgtactggacatgtcggccctattaggacatgccggctgggcttcgtagatttgcaccaaccccggcctgagtgagatgagtcagatacactactactaagcggaagcgaccatcagcaacctctacaaacgcagctattcagcttgccccttttggtgatgagataatacagaagctagaaacccctactgccatcaatgagtacaatcactatatcggtaaggtagactggtataaaccaccagagaattcaattctataagcaaaaaggcttgcgtatggtcctaatataagagacaggaatgtagcagcgtggctctatatgtgaaagggcaatgtcggcatgaattccatagaaaatagccacttcgaattaggtttaattgattaaactgcttcgtattactggatcattaccgcaattagcaaaataggacgccttactatgtatgcgctagtaaaagttgtgctgacggacaagggcatactcgggagtgactcggtagatacataaagatcctggccctgcagctgcatagtacctttctgcttaatattgttggctccaattttgatttcagtatctttctaaacaatcatcatgctttctcttaaagcttttttggccctttctctgtctattcatcttagccagggtcttgtggctagcgtctcgcaccgtcgcgctaatgcatgcactgagctctcacgaagctaccctgacagtaccattcaccctggatcttcagtctttgccgaagatgtaattggtaatgatcttctctctatgcatgtcaagccccccacgcggaaaggaggctaacacttgatggtgtagagccctggtctcagacttgtcaaactacgcccacgtgtgtttttgccccagcttcggccgaggaagtagccggtggcttggctatccttcgtaaagccgaccagacctttgctgttcgcacccaagggcatatgcccattcctggcgctgccgacatcagcaatggcgtgctcatggttaccactagcctgaatagcgtacagtacgcagacgactctaaatctgttgtccagattggcgcaggaaaccgttggctggacgtttacaaagtgcttgccaaagacaaccttgccgttgtcggtggacgctttggacaggtcggagtgtctggccttctgcttggtggaggtatctcttatttcaacagcggtatgttaacgaccggtcacttccatgaaaaattgaactaattgagcaagaccacggttggggagcgaacagtgtcgtcaattacgaagttgtgctcgccaacggtactgtatgcgcggcaaatgcgcaacagaactccgacttgtactgggccttaaagggcggttctttcaactttggtattgtcacacgtttcgatttggcaaccttttcggttccatacatgtgggggggtagcgctttctacgacgcctcggctttggatcccttggtcaacgcatacgcaagctacgctgtcgcatccggtggttccagcgatcctgcagctcattctgatccctcgatcctgtacaacgtgactactggcgaggtatcgggctatggtatctatatgcacagaggtgacgacccggcacctgctgctctcaagaacttcaccgatataccttctacattccaggacttccgtgttggaaagacaattctgggcctggagaacgacacgactcctgtgaactttggagtaggaaatcggagacagcttttttcgtccactgctttggcttccagcgctgaggcagtgtacttggtcaaccagactttcttcgacgtgattgcagcaaacccacagatcaagaccacgacggatctcagcgtcaccaatacctatcagcttttcacccctggtatgatcagagccgcaaaagcctcgggtggagatccgatagggctctacgacccactcggcaacggggttctgggtaagcatcttgcgactgtgtctaaaattacccagttcatgaactaacttcttcactagctgttctgtacggcggtaactgggccgatgccaaggatgatgagataatctacaagttcttccaagacatgatcgatgagctcgacaacagggcgaagaagttgggcctttactatgattttgtttacttgaacgacgcagcacccactcagaccaaggacatcttccagaagttctcgaacggaacagctttgccgaaactgcgggagatcgctgagagctatgatccagaccaggtcttccaaactttgactcctggcggcttcaagctcatcaacagcccagcatgaaagcttcgggatgggctctccatggcttcctctaccgccaaagtctcgtcgaggtatatgtttatcgtaggatgtggttactttttcatgtttgtataatgctatagagaagacatatacttggctcacagccgccccttaagcctgtttctccacatacttccccctcctatatctagagtgattcgggaacactaggtgtctgtactatcctaaggcgggtgatatttttattcatttagtgaggtatgtatacgagcactcggcaagatttccaaagaaatatgataaggaggggctaggcaagtggcaagctctttgctacctacttagctgccttacttgaatggataacttgtataaagctgcttgttcaaatacttggagaggtacttggatacatagttggctaggtactcggatggatacatgggtaggtataaggctcacatatctatgcggcaagcatttgtgactgtacttgattgcgggcgagccccgactcacggacctcgacttctacctgaagtctgctgtagcttgctgctttttggtcaagtcagtgttccgccagccaaaccagaccggccgcagatcagccaacttttcctccaattcagtgtagtgttctcccaacgtcaaaattgtgcgcccgttccacttgctttccagatctagcacattctctttgccgtaagtctcaaccatccgtggctgacgggccacggcagaataaaccactgccagacccaccatgtgagcagaactgacgggcagtccggctgccatgagcggcccggcaatatccatggggagtagcttcgtgatggttgccgctggcgcaactgcattgattgagatatcgaaacgggggagcgtcgaacgcaaagaacgaacgagaccgaccagacccgacttgatagcactatacaccggcaagttctgttcaggcgcgtatccagtcgcactagcagtgatcacaacggagccacccttcccttgttttcgcatgtagctgaccgccagtttggtaaacatgacggtacctttgaaattgacgtctaccaccgcgaatccaggctccttgagttcgccctgctcgtcaaaagtatcctcgaagtatggctgttcttcggagacgccagcgttggccacggcaatgtcgacatggcctgcttgggcaaaagcagctttgagttcagcccaagatgtgatgtcggccttgatgaaagtcgaattttcaggcgcttcgccactgtcgggagggttgcggtcaaacaggaagattttggctccggctcttgcaaagatatttgcagcggcaagcccaataccggaggctccgccgctaatgacgaccactttgccgtcgagccgcgggatgtcttcttctttgatgttgagagatgtcatagtagctcttgggggttgaactgagacgtggtggcaccttaatgtatccaagtggagcagtaaaggtatagatgctggctgccatcggggaatcatggcgttgttccttgactttcatgagttctgtgatggattcgcccaactcgaaatatgcccagataggcaaaaagccggaacaacaagaacctactaaaacgggatagctagcaatcaagtcatttcggtgtgcctcccgttgccggtttaagagacaatccgagcagttgcatgctttgtgaattgtgatgcaaggggatgtcgaagtccggcttcatttcccagtgtgaagagattagaaaaatcacaattttatttccaacgcctttttgtgaaagattcaaattccgttattacatgctgtttagtgtattactctatagtatattattcaacagtttgctgggtgttggatcagggttacggcctataaataatcatcaaattatcaaatcgtgaatatccatgattcaaatggattcttttgatatttttttggtgacactgaggtgctttagaaattctcctagtagatatcctcacaggtgccctgcaaagtcatccgcgtctcttctgcaaactcaaatccctttcaggccttgagacgtctttttaagagcactcgcacacttggatcgggatggtagcctcctggtgtccacaggctgtcaggtcgccctatatctcctttaaacttgaagtcaaagttgtcgatcaaatgtacaagtatcatcttaatctcattcgcggcgaaaaaacgacctgggcacgcatgcacaccatagccaaagtccaagttattcgtcccagtcgccgtaaactggtatttggactcgttacctggaaggtccctaagcttctggaatctgaagccgtcgaactggcttggattttcccataagtcctcatcgttcgaaacttggtgcaaagggaaagctatgtgcattcccggctgcagcacagttccatcatgaagagtgataggttgaacgattttacgccgcatgttcagcagagatatcggactaaggcggtgggactctttgagaaacgagtccaacttgcgcagctttggcatggacgacttattgaggtatggcaatggctcggtcgctctcaggtcctgaagctcgtcacgaagaggctgtaggtactcgggtctggcagccaagtcgaaaattgcgttcgtcactgtcatcgaagtcgtgtgaatggctgccatacttgtcgctagctgcatctgtgcctggatgttgaggctatctcgttccttctggttactgttcttgatgttccatgcacacatattgtgaggcccggttcccatttcaagctgctgtttggtgccagcgatgatgggcgccatcaagcgtctcatggtagccagtgatttgtgcactgctcgaactttggtgttgagataccgtgaggtccaacgaagtagccgcgggtatgcccggatttcaggtacagcgaagaaaacattgagtgtgaactcgatgatgcaatctaggtattcctggttacggctcattggaaggcccacaaaaatccggccagacactaatgcgacgatgcgaacaagcttactttggatgtcaatttcggtccagtctgtgaaaagaagattagtgaatgatgtttcaaggtccagtcaccccgagtcttaccgtcgcaaggtgggatcaattcttggaaggagtacacaacttcttcatgtatatcgcccatcaggtgacctgcaaagctttagccacatcaaagacgctgcagtgtaggttagcttaccgagagtctttgtgagctcgttcttgacactgttcaccacagtcgagatccttccgcccacagacgttgtcgtgaaaaggctgtgttcggacaggaaccgctgcaccattatcagttaccgcactgctcaaccgcgcttgcagacatacctcatcaatctcgtcatctagattgagcatattgtcgggtagagcctttagttcttccatgaacttagtcggcaagatgacggtctcgccatgggcctccttcaaggtgaagtatttacccttgtactgtggagagtgtcaatacagctctcgcgacatggtaggttctcactcacattctgaaatccttccctaattgtcttatccaatgctatgagatcgattggtccggtctcgtcgtaaagctgtggagcggggaattttggcggttgtcgaggtgcaaccagggcatatgcgcaagcgcaggcgaacaaggcgattgctgttccgagcgcatggtattggtagctaagtgtaagtacccgagaaaggtgatccagcatatcgacgttgttctcgagatcgcggattggtcgtcgaacgaggtgtttatcaacatgagtgtgagaatcgagagcagaagaggagaagatcacggccatagacgcacaggaggctcatgaatctactgcaagaaaggctcctagcgtcggagcggaagcatgatgggaaatggacgcgccggttttgttacaaatgcctataaaagatatgggccgagttagtcttcggaattaaccatatacagtgctgctcccgaagatacgagttcacgggcttcataccccgagaggtgcgcatccgtgggcaagtggtttgataaatactcttcaggtgcagtgggatacaaaaattcaaagtcccacgtcacttttcgccaaggtattgttgttctcgctacttgaaggaataaacaaaggctcaaattgaagttatttctagtattttgtataccagcctttcgtttcaattactgtttctactcaatttcccaccatcatagctaatctatagaagtttcccatattaatagcatgctatgcttcttgcgcacctttgattaatcattctaaaaccctttcatattaaattcgatgatggtcgccgggggataactgctgtcgcactactattatgaaaaaaccccccaaaaatatgtatgtaaaagatagacctgtatttgaaagcagcaagaacaacattaccgaattagatctacttcccttgccaaaaagtgacataggactcagactttttgcaccccagtctgggtacttgggaaggtacttgagaagttgattgggtgggtacgatcggaggtatttcaataagctcgtgagagaaagtactatcttttatctgcgatatctagccagtcttgacgtctgtccgcttcttcagcgccagcttgacgtacttgagcggagccaacgtgactgtacccgctgccagatgatcaatctcctgcttcactactttcgcgtccatgccttcgccgagcacaatgcggtacttccccaagactgtcgcaagaacactgatgtactcggactgtgtgaatttccttccgaggcaagcgcgagcgccgccagaaaaggtcatcaacgttcccctgacctgtctcgacttgtcctgtgcgacgaccttcttgttagggcgcgaatttggagtgacccctatggtacccatccatctatcaggcttgagagcccagggatcgggccagtacctttcgtggtagtgaacagcgttgacattgaggtacacgcggcactcagccggcaggacatgctgttgtggggaattgttttccgggtagacggtgatagtggtatccttcgggaccattttcgtgataatgcaaacaccagggtacaggcggaaaacttcgtacataaagccgtatgtgtactggaatttctcgaagtcatccgtgtaattaagcgacgtgcgtccttcagcagctgcctctgcataaaccccatctacctcttgaataatcctgtcctgcaaatcctgcctgagagctaaggtgatgaagccgtaagtcatggcgtttgcggtggtttcataccccgcgagcaggtacagaaaaagattgccgagcacctcgtcttcgctgaaggcttgctttcgaccggcagcctttgcctcaaaggctgaagcacgcagaacggatgtaagaagattcccctttgcgtcggcagattggtattcgctgtctttgctcagcttcgcggtctccgtccggatcatctcacgcatatacttctcgagctcaccatgcgcgatagcgatctccttcattgatgtcatcttcataatccatttaggaatgagaagaatcttgaccatgaacgttgtgactaggtgcagcgcgtgatgcaggctcatcttgtaccccggaggaattttgttgcgaagatcagaaacttcagtttcgaagtctaatcttttgccgaagcccgtgtaggaaatgacggccagagtcaatcggttgatatcaagtgaaaggtcgcgggttgtgttttcctgggaccaggactccatgagcgcgcgtgcttggtcggaagcctcgttccagaccagatcgttagctccgctgccatcgttgaaggggggtgcagtaatgcgaacgtggaagttgtacgctttgccctctgtagttgcaacattcggtccatacggctcaaggacctctggcatgtggagttagcgaacgatgttccatgagaatagcgttaaacttactgtatttatctcttggttttagaaactcatttcgcctgttcatgacatcccagcacatgtcggcgtccgcggtgtagcagatgagaccctcaggcgatacgagaaggaaaacatcaccgagctcctcgtgaaccctgcgtttctcttcccaagcccagtcgagaatcgaaaagcgaatccatcgcggccagccctcgcctctagacagtcttgatgtgaacaagggacgaatgagcggagtcaagagttttccaaggaactcagtctcaagtacgggcacaagagtatacggcaggccggtttttttggcttgacccacgtagtacgccaatttgacaagcttgtaaagtatgaacaataatagggtcgtgcccacaaacgagcccagaggcaactttgaggcgttcatagtgcggagagtagacaaggaagcgaagctctctgaggatggatcaagtcaagcgtgaaagctgacagctggttggtctctctatagaccttcctttgtgcaaaaatgatacagtatggtgggagtttgcccgccggggggagttggtttcgagcttttcggtcgccggcccaggacacccattggaaatgcccgaacaagagctctggatcggcaccgcaggagccaaaaggaccatattgggacgcagatcgattcagtcctggtacgaagtatttactggtaggacggacattgaacacatcaggctgcgtcgcgttcaaacagattacttccgagcttacatagcctagccgcacacgtagttcggcccataccctgattagggaagggaaggttattgactagcgctgacatctgacctagaactttattcggaacttgccatagtagttccctccccgcgcatcgattgtaacttggagatgcagtcagcataggtgagagcttggggtagggtactagagcgaagatcgcccagttccatcgttgcttgcctaagcaccgccccaaggatggaacctcaaacgaaagaccccgaccccctaccgcgtctggtgcacataggcgaaatacagttcaacctgggcgaagtgaccacgggcggagtgacgccgcgaggaactttcattttctgccccataactggcggtgagttgaaatatagaaacacacattggacctggggctgacccaaaggcaggacactttaccaccgtctttccattaccggacggattcggcattcactcagaggcaatcgaaggtctgagggcagaggtgcttccaggtggcggcgattatccgctgatacataacaatgaacttgcggaactgaatgtcagcgtcgtcgccaaaggtctcaacaacgatcatatattccgtatcacctctttcggtatatgcgaatggaacaaactcatattcgatatgatgggccagacagccgccgcacgctcgacggagatgggggaaatcaacgcatggcaggtttttcgtatcaacactgatagcccggagtatgcctggctaaactgggcatgcatcattgggcaggagagactgatttacgaagacagtcgcatggctaagactcacatgaaattgttccagtttctggtaaaatagcgatatagagatactcaaattatcatctccacgacttgtatctaggctactataatcatgttcatgtaactggtgctatgtagatttcaatgatcggatgttaagcattgctcattagcatatagtccgcctttcatatgaccttgctcagacagattctctccaagattgataagaccctcgacatgttctactggaacctcggtcagtagatccacattcacgcactatggtccactcacctactcacacgtctcttcgcagggatctctgattgttgcacaatatccaatcaagaggctgcatgtggagctgcaccgaagcggtatcatggctgcgcgtttccaggcaataatgcctgtatatatacgacaagagctgtgcagagacaaccatagaacagcgagagccatttatcctgtcgagtgaacgggacgggaacttcgagactgtagacggcactgcgcttgggtgccatggttctggaaagacgattgcgctgtgaggctgcctataaattttgttaccgaggagaaaagggctggctctaggggcagtttaaatgtagtgtgagtctcaatttctcttaatatgagcgacttttcacgaagcccaaagtagaaattcgccaggttcccatactcggacggagccgagctgtttcgggatatgcagaacacgtgaatcacgaccgccatcttggagtccatttatcttggaagtctaggaagtacctgtttgcatccgcccatgcctatgttggctttacctcattcctcgaaacatcctgcttgtttatatactaccgcaagacctgatctgcctggcaacataagtactgtgatttgcatctcgtgtattgctgaacaagatgtacgagctacaacaacatcgaaagttcagtgcgttggatgaaatgcttccagcattttattactgctacttactttgctttcctgttagcagcgataacagggcgagcacgtccgagctcttgcaaacctccctatcctcgctggcagaagaacgcccatacctgactggtacagtccgaagggatatggaaagcagtgtgcgcaaaggccatctcatcctcgacataccgaatcccttcgaagaccttcgtatcgtattcaacgatctcacaggtccgaagtcccaatggaaggagacatatcaggatctgaaagacaccggcatgccgccacacaagctggatgcaaacttgttagcacccctgacagccggtattggagagacacggaaagtcatgtcggtgcaagccaactttatccacggcggactattgattgccttttgcttccaccacaatttcgtggacgcatatggggctggacgcattattgcgaggttttcagaccactgcaatgggactgttgacctcaaaaatagcgctgatccagagggggacggtaccgattcgaggggcatagcagacctcctcgacgttgaacttttgaaaaagcagtacaaattcgaggacctggaaagtgacccaaacctctggcgactcaactgcctcgagttcaggggggttaacgattttcggtggcccgatttcatccctgcccttcttccagtgaggaagccaccagtcatctcgagtatgttctcgttcagttcagacgctctggcagaaatcaaagctatggcacaaccgaatcaaagcggagcgtgggtgtcgacaaacgacgcgttggtggcctttctgtggcgacataccatgagagctcgctttccatcatcgagaaccgaaagcgagcccccaaaccgcaagtcaaacgtggtggtggcacttgatggcagaaaagacctttctatatcaccaacctacatcggtaactgtcttttccattgctttacggacctgccgatcaatatggtaggaagtgagagcacccatcttggtgatattgcgatcaaagtcagacagacgatcaccgcggcccgaaacaaaacgttgctgaaagctgtcgtcgggctggctgccactcacccagattgccagacaatcaagtacgccaacgacaatctggggcctgacctgtacgttacctcttggattgatctgccgttctataagcttgaatggggcccacttggtaagaccgagttcttccgcattccagaccgacaatttgaaagtctctgttgcattttgccgccaaaggatggggttgtccagttgattacatcgatggaggaagatcatagcaaacggcttcgaagtgacgcagagtttactagatttgcaacttatagatagccccatagatagccaatccgcagcatggtgtcaggttcaatgcttccctttgtaagtcggttattggctggtcagtcgattgaagcatctattcacacgaatattggaccaaaatgaataaccaatttgctttgagtatgaaatgttcccaaatgtattgacctcgctatgccttgagtgtgctaccgtccacagagtgaaatctgacagtcagggcaggcttgtcccacatgacatggaccttgctttgtccttcccaatccagagactgatccatcagctccatatcatatttccagcaaagtttcgaaaggatcaaatttagctccataagtgcaaaactgtatagactgtcagacgctttttgtaaacagctacggagctgtgccacttactttcgccctaggcatcctcgaggacccaagctgaaaggctgagatgattctttgatatcggtcgacttctcattcagccatctgtttggatcgaatttcatcgggtctttgaacatttggggattgtgcgtcacagtccatgcgctggtatagatctcagtctggcttgcaggttagatagaatgctcatgattgagaagaaactagtaaacacgtacaccttccggtatccattccccatcgattgcgagacctggtgatagtctcgggaaaccctgtgagccagggggatagattctgagcccttcattgataaccgcctgtagatatggcaactgctgtgcagaggtcgcattgattgactcataggtagggaagcggtttctgatttcttcacgcatagctttgtatacctccggagtcttgagtaggtagtacactgtagctgccaagaaagttgcgacagtttcgcctccagcaatgatgagagtggatgcatgagctgtcatctcctcgcgatcaacttcgccggactcaacctttgaaattagattggacatgaagtctttccgaagattcttgttggtcatgcgctcggcaactttgtctctggtgaattgagagtgcttatttcgcaccgcagtcagaacaggtgccaagaatcttgccaatgtcagtgcaaatggcaggcgccgcaaattgtccgcaacggtgataaagtaaagatgtttgagaatcatttcctgccagtagtgaggctcacctcggatgatgcactcgaaagattgcccaaaggccatctctccgagtatgtcaaacgctaccatttctgtccacttagtcatgtccaggccttttgtctcggaaccaccgtcgttgccaagtcgcgtgatgaaagcatcaacggtctgagagacaagtggctcctgctccaaaagggctttcgtcgaaaatgcagcagacagaaatgacttcatctgccggtgcttctctggatctctctcacttccaatgcagagcgagttaaaccccgacccgtacatatcgtagaattcactttttgttggaatcatgccccctggccggtggccgtatattgacttccatgaggacacagaggcaaatgagagctcgtttggagctactctaagaacggggcctttttaaaaaagtcagcagctgcttgcgtccgggcacggatgaacttaccgtatttctggtgcccagcctctatggatcggtggattctgcctttcaaggtcattcgcattcgccatagctaattgagtcagcgagaggaatagattgagtaaattgatatcttaccaaggtcgacctagccaatagtggtcccggaaacctggccaggggatggaaccagaggttaaagactatgaggccaataaaatagcagagggcctagccacttgttagcaaaataaagggcctggtatggtatgaaggatcgaggtgtatggccattggccaatgccaatgagcttactgctgcagagatgacgaatgggagcacgtaaatgctgtgggggggttgatcatagacgaataagagaccggggattggagatatggtcatgttggagtaggaaaatttgagttgcatgaatatgctgcggtaagaattcacttccagatagctcgagttactcttccgaggaaatcgtgtggccacttataaacataagcggcttcacctgttcggactcatgctgttttgggtcacatttgcctttaaaggtctatatccgacatggcgaaaagctgacacaacgacgccctgctaactagatcgccgatctctcttcggcgtaagcactactcccatcccaagggcacctcccgttctgggtaaattatccctgaccaatcacagcatggaacggcaccttcgattcctcacacatctatccatgtacgccttttggtcatagcgttagcggctcttcctggattttgtggatgtttggttttgttttttttgggttatgtcggtcgaagggccggcctggaggcaatgcaggcgtgctccgtgttattatgtcgtattttcgcccgtcgcgcagctgactcgcatatgcaggagtggcgggctgtgcggaccggtgcgaacgtggcgtcccacgagtggtgtagaacctgcttggcagggtagagcatctgcttactagataacgataatagagcgaagaggttagcgtatctggcttgactgtagagcgtgttactacaaagctgattattgggaggaggagatgaagaagaagaggaggagatgaagaagaagatgatgataatgaagaagaagaagagaagtcctttcttcttcttctcttcctcctaagaaggggaggagggtctcttaataccgccctaagtatcttgatttactaaatgtgacttatgcatctcccgcccgaatagcttcataatccctgccctacgtgagacgccacaataacaagtacatgtcagcataacagtctacatactataattcctggaaatttgagataataaagttcaaggcaagtgctcgggtctctacttattcacaaccctctgagaactgagatcacttgctaggccagaatgtttggaactctcaggatcgggtccgagaagaactctgtggaatttatcgagcatgccaaaggagaggctgcaagccgattaggaggatacgtcttctcacattccgcttgtgaaagctgccgattaaaaaaggtaaagctttcccgtactagcatcggttggtttgctaatataactcctctggtcaactagctacgttgcagtggacacaagtctggctgcgatcgctgcagaagccaggcgatgaaatgctcctaccaaataggagccccgagcaacagctcgcgaccgaagtcaagatcacatttccaacccaacttctctaacatgagtgggacagctggcaccagcaaggctccgagccctctgggcaatgatggcgtcgatcgggagatcggcgggtgggaaatggctgagaccgatccgactggcagtgtagtgaccactaccgcccaattcttgaatagcgtgaaccagggcgaacactcgaatcttaacgacttgcgtcagggacaaagattcggcggtgagcttgactattccgaaaacgaacttaatgatattttcagcaacatcgcctatctccagccagacgatatggagacgaacgttttcgtgggtgccgcaaatcgagctgtcctcgatgccgaggcctttgactcgatgaccgagccagcaaattctatgtcggacgacataggcgacatcgcggcatctcaacctccatctgccgatgttcagtcggcgttcatggctttcgatcatgcacgcacctcgtcttcctcgtcgtcacaccaaagctccgatacctcggctagtgacgcttttatcgcaacagatttcgacggagccagatcgaggacagatccatcaacttgccaatgtcgaggatccatcctccgcgttcttgctgagattgagtcgaacattttatccgccagtcccagcaacatgtacgctattttgtcatatctccgtcagacaacggcagcaagcaacgacatcttgacatgtcgcatctgcaactgcagattaaagttcttcggacttcttgggatcattggcgagaagatcaccagcctctcgggggcaataatcaccgcattcgtctgccgcctgaaggagcaaaatgagtctgtggatttcggcaagtccgattctcctgacaagcgtcttgatcccaacagggcaatacaattgtgcgagtttcaagtccagtctctgcaggaattcaaagtcgtatcagctgccgttattaagttgcagttgaagtattctgtggcctttgtctctcgcactcgtgagcttgcgatatccatgaatcatcttgcacaagctcagagccttgagaagcttgaaagcaggctgaacgagctcgtcatcaagatgcaacgaatggtctcggaagtagactcagacctttgtgatatatgaggcatctggggttgttgcaggagcctgggaggattgcaggctacagtggatgcctacagagcttacggagccttcagggcctatatgtaccgaatacctgtccattgtagagcttagatagtcagtcaatatttgcagttaattcagtcagtcattgcgagcataaagagatcactggtcatgccatcagatacctgaaacacagataatgagtgaaactgacggacaactgggtttacaaagataacacgtatccagaaattatgaaaagagtccgttacttctgtatctgcgaggcacctttccgtatccggtatctccccgacttctttacgaccgacacgctcgagaagggcatgttccgacataaggctgctcgaggccatcaattttatttgtcatcctcatggggcctagtaaaataacctggagtgcagcgcctggtaaaagcagtcgaccacaacccaaagatttccccaattccagagtacctacctagcacttctttgcatacccgcagtcatggatgcactcgaggctccagagctgcttttactaccccacctgtcggccttgacacccaagactggttttctgattggagtgagtacccagcattcgtcactcgcaaggcagttctgaaataaaatacagcttgctctcgctatcaccgcatactgctactatagacacacacaacatccactgtacaagttcccaggaccccgatcggccgcatggagcaacgtgctctactgttactactacatccaaggtcgacagcccttcaagttgctggagctgcacaaccaatatggaagcgttgttcggacggctccaaacgatctctcctttaacacggcaggtgcatttcgagatatttacaacttccggccgggccatgagacttttatcaagagcgactggtatgatgggggcgtctttgcagacaaagctcattcgatcgtgagcgagcgtgaacctggcaagcatgggcacatgcggaagtatctcagccacgccttttcggacaaatcgttgaaagcgcaagagccactcatcgatgaagttgtaaacgagtttgtctctcagcttgacgtgtttggttcgaaaaagggtggcatcgacattgttgtctggtttaatttagccacttttgatatcattggctccttggcatttggagagtcttttgggggcgtcaaatcaggtcagtgctccagacctcatacatcgcatctatactcatcattcacataggtgaggttcatccttggatttcgcgaatcatcacggcgatcgggcagagtgctttggcagatgccttcaagcggtttccaaaattcgcgaccacattcaagtggttattcccgaaagcaattgagaagatgctggaagacacggcaggccatgagaactataccatctcactgattgataagtatgcctccgaagcttcacagggctatccgtggaactctaacaccttgatttaggaggttgagcaatccatctactcgcccagacttcttgacgcgcatgctggaaaacagaccagaagatttgacagatgtccagatcgcggcccatgcgtctgactttgtcattgctggcagcgaaacgacagcgacaacattgagctgcatcgtatactatttgaccaagaacccatcagtatatcagaaagccacgcaggaaatccgagacaggttcgaaagattcgaggacatcaactcaacagcagcttcgcaactcaaatatcttcatgcattagctctcgaggcgatgcgaatctatccacctttgccgctggccttaccgcgagtcgttcccaaaggcggagataccatcgacggtcacttcgttgcagaaggggtaactacagatccatatccatttggtttgaaccttcctaattcaaaacagacaatcgtttccgtcaatcctgtagcagcttgtctatctacaaagaactttgatgcgccactggagttcagaccagagcggtggctcgaaagtgatttggtcgatgatcacgaggcctcgcagcctttctcgatgggacctcgagcatgcctcggaaggaatttggcatggatcgagttgagtctgttactctcgaaaatgctttgggtctacgatatcgagcttttaaacacagaagtcgattggttaagggattccagaatggcgatgctgtggaagaagccaaagctaatgatcaagactactcgtaggcgagttgcttcatgataataacaagattttcggacgccctaggacgtcctctaatatctgaacgatgctatacttagacatgaatatattaatgtaatagatagacatgctacaattggcttacaattcttagctgactagcgggaaggctatattaggccttgacaacttacaaccaagggaagttctgtagtattcaaacccattctctggatctgcggtgaatctaagggaaggtcagccttatatatatatgggaaggaattgccacctcagatgcagctaaactcactttagccaaagatttacagttccataatgtgaagtgttggtctgaggaagtcttttatctttctcctgaattgagtcctcctgtctatgggctctaggaatatagctattcctttcccgctgtaaacggcgtttcgtctcggcaatcttattgcgctgagcaaaaaagtcctttctgcctataattacgtgtggcgcgggtggaggcagggaatttatttaaagtaaaagaacgcgatattagatcaaggtaccaagtaaaaggtttttgaatagaaggtgtgtgaatgattatatactattgttagcacacattctacatttatatctgagattttgagctcaagccgctcttaattagaagataaaaggagataacatcctgaaacggatggagttcttcgctatttcctgcgcccctccgtcatgatgtattttcttgatgagataaagtgctccggaaaatgagggcagcagcaatgctatcagcgaactaaccatcacagtataaacgaccctgtgggggctaatcccttctgggtatagtctgaggtgggcatcagtgttgctcactgattggacactgagcactcactgagcatcagtcatcctgcacgtgactgatctgagcccgtgctgacatctacccagtgagcctgagcctgagccctcacaaaagcggcagctcaaataggaaagccccacccgccagggtatttccggtacgtatagctacatatatgaatttttgttcagtcgcttcacattctgtggtcaggaagcggcctcttctgtcattggccataccgggtgtctatcccagtcactcacctactgtaaaacatgcggatagggacgggtactgtaatttaagctggatgtatcgtgttggcttagaattgtcattttcattctgttttgaatggccatattccctgagaagtccgtggcactaggtatataattacgaacctttgggaaagtccgtcaaggaactaatcgcccgccattcctcaatcgctgccaaggtctcagatgcggccttgctgatctcatcgcaggcatcactccccaagggcaagagagcaggcaggggtttcccctcggcgattcccgtggaggtaatgacgtcgtagataacttgcgtgcccttcacggggttacccagctgggcgccgttaaaggcggcgaagttagagtcggtggtggtgtttacctcctggtaggccgatagacgcgaggactttgcggtctgagaaatattggctgacgggttcagtaactcggtgcggaagaagcccggttcgactaaacagtggcggataccgaacggggagatctcacccgccagcccaagtccaatccagcgcagagcggctttggaagcgttgtagagattgcagccaggcatagggtaccaggcggccatagagccgatggtaaccaaagtgcccgaccccttagcgcggaggtgtggcagtagggcgcggtaaaggttcagagggccaaaggtattagcctggaactgacgctgagtctcttctgcggtagcctcttcaagcatgcctgtctgcacgtaggcggcattgttgacaacaatgtcgaccgttccatagacagctaggatagtctcgactgctgcttggatctgggctgggggctcgttgtggtctaggtagacagccttgatattagggttagttgactcgagctcggctaatttatgcggagtccgtgtggcggccaacacgcgatccccgtgcttagcggccactttagccaactcttggccaagtccggacgaggtgccggtgatgagccagatccgggaggtagtagccatgatggatgggtagatgatttgttctcaaaggatggtattgaggtcaggaggggtgtgctgctgggaggaggggaggaggacatctatatatcatatgggccgatgccatccggtgcgagtactaaactccgctaactgcgaaacaaagatactggctccatcctaaactccggtaactacgaagcaaaaagagacttcttacatcctagtcaagttaacgtagcctgataggtaaaacgatgaaacgaagtgggttcgacaaaagtccatcagtcgatgctagaataagaggaaggtcgtccgagactattgcactaaccggaatcctgctggccccatagtagtagttatggcaactgggccaagacctacatattatacagtgtttgttgtatagtatcggagcgaaggatgcatgtctatcggctagtattcaaaccggcaaactagattagacagtatcaacgtgagagctcatcttaaagacaggcagtgctgtttcccggataccgtgaggacagtcaccgaaaaacaaaattatgatttctactgtttggttagagcgtcctgctcctctgcttaggaacagtaagcgcaggtacgttgatgagcgcccatccgtagatcgactctagtaaccaagtggcccgagcgccagcggggagagctccgaaccacaacgtccttccacccgtctcaattaatggcgagccgagatggcgctgacatcagtaagatgccgaaatttcatactgatggatcacagctgacagaagcaacagtggaaagcattcaacttcatcgacgtgtcgccggtgaagctaccagaggacagctcctcaatcttcgatgtaaggcctcgaccttcctctgctctagcccacggcgtatctaactgtcacccctagagcgacctctcgagtatctgcactggctccgcgaacctctttgttggcactaccgatggatttgtccacatcctctcctcggccttccgcgtcgtgcgatcgttcaaggctcacgataccggttccattacgcacatgcgacagataaacgataccgctctgctagtgaccgtcgcggaggatctttccaacgagccggttctgaaggtctgggctctagatacggagaaaaaagatggaggcccggggtgtctgtcaacggtctctgtacaaaatgccaggaggcagttcccggtatgtttggcatccgaagcgggaataaaatggtcaatacttacttataatggtatagatatcggctttcgcagccgtcgacgacctctcacaggtagcagtgggtttcgcgaacggatcggtgacgatcatccgaggcgatttaatccacgaccgaggcgcgcgacaacggatcgtattcgaatccgaggaacctattaccggactcgaaacccaaatcggcgctgtcacaaccctttacatttcaacaacgagtcgcatcttgacattggtcatcgccgggcgagggcagggccagcctgcgcgcgttttggaagatacgggctgtggcttgggctgcatgactctggataaagagggcggagatgttctaattgcccgggatgaggcgatctttacctacggtccgcgaggtcgtggtgcgagctatgcgttcgagggcccgaagacatctattgatgcttttcgtgactatgtggcgctcgtctgtccgcccaaggctgggactagcaagtccgatccgctaaggaaatacggtgctagtcccgccgaggaaatttttggcacgactacgttcacgcttctcgataccgacctcaagttcatcgcgcatagcgaagcgctggcgtcacctatgaaacgtattttcatggaatggggtgacttgtttcttcttacgacagatggaaaggtatgtgattgatatgatcttgtgttcgtctttcttctaaccggttctagatcttccgttatagggagaagaccctccagcaaaagctcgaaatcttatatgagcgcaatctctacatccttgctattaatcttgcgcaaaagattgggattgatccgctccaacagaatgctatctaccgcaagtatggtgactttttgtaccagcggggcgactatgataccgctatgcagcagtatctccgggccattgataatacagaaccttctcaggtcattcgcaaagtcagtgagaattgggattcggcattgttctcgtactaactttgatgtagtacctggacactcaacgtattcacaacttgatcgagtatcttgaagagctacacgaccatggccgtgccacggttgatcacacaacgcttcttttgaactgctacgcaaaactcaaagacacaagcaagctagactcgtttatcaaagctcctggtgagctgaagtttgatcttgaaactgccattgcaatgtgccgtcaaggcggatactatgagcaagcagcctaccttgcaacaaaacatggcgagaacgacatggtcgttgatattctaatcgaagattctaagaagtacgctgaggcagtggaatacatttggcggttggatgctgaagtggtatgtctaaactgcgtctgcgtcatcgggggaaacaagctaatatgtgctaggcctatcacaatttgatgaagtacgctcgagtattgctaacacattgccccgagcggacagcggagctgttcaaggtttactattctggccagtaccgaccacgcacggaggtagaacagaaaccagagccccaagaacagacgaccagcacagtgcaaagtcttgctgcccttcttcctttgcggtatatgactgttggcacacaacctacgcctgaaatccctgagccagcggcaaatgaagacaaggttgagaattcgacgccagattatcacattcccaagccccgaacagctttctctgcatttgtggatcatcctaaagagttcatcgatttcctcgagaccttggtgcagcagccggacttgaagaaggacgccaaggttgatcttttcacaacactgtttgagatgtacctggacacagcaaaggggaaaaaggatgcaggcgaaagacaggaatgggagacaaaagccaagaaactaattgaagggaaagacgtaagctgtcccatcgcccattcatcgccttatatctaacccacctagattccgatctccacatccaacgtgcttctcctctccgatctgtcaaatttcaaggaaggatctacccttgttcgcgagcaagaaggtctccgcctggacattttccgttccttcacttcagcaaaggatacacagggcgccatcaaagcgctacgccggtacgggcctgacgagccccaactctacgtcgacgcattgacatacttcgcctcgagcccgaagatcctcgaagaagcaggcgacgagctagacacagtcctgcagcgcatcaaccaagacggcctcctctcaccattgcaagtgatacaagcgctcagcaacaacgcagtagtaacaatgggccgcgtgaagaagtacctcagcgacaacatcgaccgcgaacgcaaagaaatcaccaccgtaagctccttcaacaagcccctcctgttcagcgaatagtaaagctaacccccatcctttctagaaccgccggctcatcacaagctataaatccgaaaccgcaaccaaacagcaagaactagacaacctagccacccagccagtagtcttccaatctcgccgttgccaatcctgcggcggaaccctcgacctcccaacagtccactttctctgcagacactccttccatgagcgctgtctgaacaacctcgacgacaatgcgcagtgtcccgtctgcgcaccgaagaatgcgactctgcgcgcgatccgccaacggcaggttgattccgcggaccagcatgatttgttcaagggagagctgtctcgctcacgggatcgattcggggttgttagtgagttcttcgggaggggtataatgaggccgcagagtactatggagtaggatgggtggaatggattgcactttgtttagatacgcttgttctcattcttttcatgggcgtgttttatatggagctggttttcttcttttgatacctcgatctttgtcatttagatcaagttgtttctcctactggtgaaggtagtagatagtagatagaaataagcagttctttacacatgcaggtctttacgatagaacaactacttggaacaaagtactttggaggcaaaaactaggactatggattatgtccatgtaaagaaatcattgttcagttaaactcgcttcgctctagcaagtaacaacagcgagctaaggacaaaaaaggaattatatgaactcgataaaatgagcaagtcgatcacggtgatcaagcaaggtcattagatgcaaagagcaattaatatgcacagctgatgagataagaaaatacatgaatactgtcgaggcaaaagggtcgaagcaatagaaactgggtagatacatttccattattcactcgagtcggcaggagtgcgacaatgtctcctttgtatggccgaggacgacatattagagacgaaggataggatagacaagccaagtcgagattcttctatccgattgactcgttagagatcgatctcgcttaaagctcgcgtcccttctcgcctccccatgaaatacgcgggatgtgtcgggaggtagattgggagttggagccggatccagatccagatccagatccagaggactgttcagatggcttgtgtgtttcgccgggctggttgtttttcgtattctggcttgattggccagtctcgttctcttcaatgtctgagtcttcctccacgatggcattatcatccgaatctgagccatcgccattctcggactcctcaccttccacacctaaggcgtccagacggcgacgacgctcggctggggtctcgcctgtgtcgtcgtcagcctggcgtgggggcgcagtgagaccagcggcttgacggagacgcgaaggtgggatacgctctgtaccatcgtcgtcggaatctcggcgaggccggtcccgtatacggggtggcgcagggctgaagttgttgcggcgttcttgggcggcggaggtaccaacgccacgcgagaacctcgccagtgaggcggccacgttaggggaaccatgatggttgctagactcgtcgtcactaacgtcgctatcgctgatggactcggaatccatagcttcagtgtcttcttcggggatggtgttagcggcagggtggcgctcttgctttccctgggccttggcttcttccttggcttcgtgctgggccctttcttgaactggtgctggtgcgtcggtttgctgaaccagatcccggcgggccttggcgtcaagacccttcatctgctcgaagaattcctgcttgttcatacgtcggcccttgtggccaatgccttgagcgtcgacttgcggatcctgggccaacgtgaatcgaatgccgtcgtcggcggtccaatcgttatctttattcttttcgtggccagcctgggaagattcgccttcttcttccatgccgagccaggtccccatgcggttcaaaccacgtcgaacaggagcctctccagggacggtggtctccttctgggtcttctcacccttttcacccttcttgccgccaggaagggtatatttcttgatcacctcaccgtcctcatcctcaacaataatagtgttgccgaattggtatgcatgagctgaacgaggtttgggcttttctttcttttcggtctctgccttctcctcttccgtggctcgaccctttccaagtccggtccacttggtccacttcttgagagcgtttccatatgacctaccaaccttctcctcgagctcatctccctcggtctttgtgtggggttgactctccgatgctgcaaattctcctgatttatctttttccagacgcttgcgttgcccttcaatgtggccagtcttctcttccggagacatatgagaggtatcctcagtcgagagaacattgccctcttcatcctcaatgaccatgtcgtggccctcttgataaacctctatctccggttcacgaccgaatcgatcgcgctcggcacgaggtggagaagctccacgctcagcctgatcgcgctgatcaagttcttgcttttcttcggcctcggcctcggcttcgtcctcggcgcgccgagaagcgggcataatagcagactggctaattgggcctccgccaccagcggcacgcttacggcgacgtctccgcaggggcttgcgacgagaagactcgaggttttgtgactcactatctccctcttcgtcacgttgccggcggaggaagttgccaggcatgccgatggggggcaaggtaccgggaggatactcaggaagcttttcgtccgatgaggcatctgtatcatccgtcttacggaaggacatggagcccttggcgattgactgcacacgaggaagacggttcatccatgaaggtccctcctcgttggcctgtgtgtaggatagggtgatagtcaaggtgttgatacgtttacccagagtgaaaactgcaatagacgaaccatgtactagaatagatgtgatgaccatgaatgtagtgatgggccagataagcctgacaacatagtaattgctggttcctggtattgggagctcgtcttcaggcgatggttgtgtgttgtcgttctccagctccgctcgagcgaggatggcggcgaaaatggcaccgacaccgataggaccgaaatgccctgcgaataaagcttctcgccaagttttgacgtccggtattattggcttgagcattagcataatgggaatacgtcggaagaagaggaccaatatcgcaatcaccaccagccgccaaggagtaaggccgagctcgggggagttgtagtcctcccagggaatgatggatccgaaatagacaaagtatgccaagttgagcagaagatcgataacgttggagacatgagattcctctgtcttctccgtaaaccaaccatcgttactgaatccaacaccacaagcgaatccgatcagcaggtcgtccatgcccagcaaagaaccagaaccagcacagaatacagccaacacaaagtagaatactaggaaactctcacgatcgatcaatcccttgcgctcagccaacttgatcgcatggcgagcaaaatagccgatggcgaagccgaaaatagcacccaagatacactcgtacaaaacggtgatacagaaccagtttagccacacctcgccgacttgaggacggaagtgatagatgtagaatgataggtagatgaatgggaaagccataccatcgttacacccggactccgcagataacaagtcacgcaaatgcttggggacacgcttggcgaactttcccttaccaacgactgacgacgccaagacaggatcggtagccgtgacacaggcagcacacaccagagactccagccagttcaggggaggcaccatccaccagataaacagactggtcattaaccaaccccacgtcatgacggggatcagcagcaaggtaaccgacttccaatggcgttccatgtaggcctttggcaactcaacgccgacggcgaaacattgcacgaccaggacaattcgcgagcactcgagagtgattttgtcgacgtttccccatttatgcggattgaacaaatcggccgcatgggggccgaaaatgataccacagagcgtggctacggtggcttcaccgatgtacagcttctccttgacgaacaaggagcacagcatgaacagggctgtgaaacctcccaggatcatgtaagccacatgcggcttatcgatgtccagatgatcccacgccatggtgaggatgtcggtgattgaacaccaattgtattatatccgggaacttttgtaatattccgtccgcttcgtaccgcaacgagcaaatttaccggatgatttccgccctcgaacttcgttggtctgcgtagctcttcatgccttggtgaatcagtgattgaacagccaagttgccgagccttgtagggctgaatgaggtaaggcgattcaagagcacgtccgatcggtttcgcggtgggtgacggtgcagattgtggggggtgcagactgtggccaagatcgtggggatgtcactggggcggaggcgaagctagataagaggttggagaaaaaaagaacccaggcttggcctcagggaagtcaggcacaggaagggggagaagaggagagagaaaagatttttctagacaggagcgaaattcggtaagagtcttgggagctcttggccaagcagaagaaagcgagtcaacgcgcgcttcgggagatttgcccagaaggaagtattcttggaaatggcgggattcgtcagccgagacattcaagacccacgttagaagcggaattggtcttggcttagcggaggactgaacgtgcaatagactaggatgtctataagggaatgaggaaaggtcctgattctctggagatatcggagaagaatagaaggagaagatcagataataatccgctgcatacggcatgtgtctctgatttcaccggaacagttgcaggcagtgtaagattcgggttctgtacggtaatggtattgtaacattaagatcggccagccctgtcaagtgccaagaccgaaactgggtcggtggcgtttctagcttgtgcgcagtgtatggatatggatagtctagtggggctcggggcacatttatgatatcggtctggagtggatactggtatggtatggtatatacagtacacttagtaaaataacttaccgataatccatatctgctatgaagtatggaatgtaggactgcccgtgtagagttagtatacagagtacatagtcaatatagtacacatatcttggaatattgaacagaagacaatcaaattgggaattgtgagtaaaataaggcaaatcaaacagttcaaggattgcaaactttcaggggaatttgatgccgagaacccaacatcgtaaaacacgcgcaaggattatttccggggaaatatggggagaaaaaaaaaagaaaaaaagcaaagattgcatcagtgggatgcagtatgcacaccgtgcactctgcgcgtaccccaaataagacagttgccagtccacccgcgggctgttatgtacgatgggctgtacgagtacgacctgtaaccacgcccaatgctgccctagctcgtcggcatcctctcaacttcgtcactcaagccacgccaattgtccgcctgcagttcggcgtacttgacacgctcctggctccagtcctgatgcagccggctgatgtgatactggcttcgctggaagtgaacgagttcgtcgcggatgcattctgtgatgaagacgccccgagcatgctgttgcacaatggattctttgtcctagtagacaatcaaggttagtattactgtaagtgccattgaaacatgagtctcaccttgaatatagagtcttcaaccttctcgatctcccctggtttgacggtgcccgagggtcgggcacgtagatcctgcagcttctgctcactagtctcaatgcgccgttccagctgcgcaatattgttccgtgcataccgatcccgccgatcgaacatttcacggacactgaccaagcaatcgcgttgctgctttagatcttctagaaccccctcgctccatcctcgagcttcgtcctccagcagactttggctggcagagagatgtcgagcggtcgctgtgatgcctgcattaagggccggaatgtcattggtatccactgcgtatgtgtctctggtgacttccgtcaaggactgcagggcgagtgagaaccggaggtggtcagcagccagaccatcatttcgcttagccaatcgctcaagtaaagtgcaaagactaatatagatttccgcagagcgcttgacaccactgcgaacggtttcgaacgtttcgttgagagtggcgggtaatgagtcctcgagatccggtgggaggacacggccaacaaattcgtcttggactgatattgtggcttgttttcgccacaccgaaagttcctggtttcacagttattgtctgtctcccaacaacccaaaaggtagcttactgttggaacggtcaaaaacatgatcacaagctgctcctgaccaagaacgggatggcgaacgagggcgttggtgaatcgaacaagtccgtgacggcgcttttcgaggaaagaggatgaatccgctgaaaggtgagtgccattgacttcataattgtgagtaagcgatgaggtgcgctaaactagcgttttgcatacctgaaacccgcttggggggaagaagaggcaattgccggaaaggaaatcgcttttggaggcagtccaatagccaaacaaaatcgctgtaacgccgaataaccgtgctacctctccgggcagacttaacctcataatttcggtgttgaaacataaacaagccttctttctcggggagcaacgtgacagttacggtctcctctacctgtgggtttgtcgaccggccgataccaagagaccgacgtcgtggtgtgatgtggcggggctcatcctctggaccaaaaccaccgagtgctggaggcaccgtgcccccaaagctgctttcatcgctcggacccgctccgctgaagtgattgttatcccatccagacccaagactgctaggctgtacagcctcggtctgaccattggaatgctcccgctgaaccacgttgctttgtgtggtgtcttcaatcgccttgctagtccacgcgttcgtagtggacctcacactgccgaatccattcgatacacgtggttcgatgcctccgcctgtctcatggccgtggccgtggtgcaattctggactgccccatggatctgactccaatccgcctaatgacgctcgtcgtaataacctttgcgattgtgcggagccgggggtttgcaagggagaggaatggtacgagggagtagcaggtcgctggtatggttgttcagagttcgcgtcgccagtctttcgtagtcggtcgaggtagccagcctttggctggggtagttctgcattaactctgcgttagagggattatcccgaataataaataaaaatatcaaagggcgcaaagtcaactcacttttgcggcgatcgtccactgcatcaaaggagagttcctcgccttcttgcgctaggcccaccatcgccaatagcacattgaactcgccacgaccgagtccattaaagctttcatgatcaccagaagcaacaaagttcaagattttgctttgatcagttgcagtgagcccgctgcttgagagaatctcccgcacagaggtcaacccaatgccagagccaaccctgtccccgctattcagaatcaagtcgtatgcgtctatatagctctcaggtacgtccgtattgggaagcaatgtccgagccagatcgcgccgggcagttcttttggcgatattgttttgggcattccaaggagaggagctgtcgtcgccgtcgtcatcggcgaacagcgaagagccgcccgtagccggctcgtcagcaaacagcgaggacttggacctcgcaggatcacccgcagagggatcctctggagatgtgccgaataaggacatcaggaaaccgacggggtggtggttgcgccaggagtgctgtcggggtcaggtgtggaggtgagggcgatgacgatattggcgatcaagcggagctcccgaggggggctggtcgcacgaatatacaagccactttcgacctcaaaaagaaaatcagtcctggagacactgcgattctcaaaaagctgagacgaaaagcgaattcagtgacgattcaagtccaacgaggtgagagagataacgggccccaatgtcactagtaccgtgcccaaccgagttagtcaggtcaggcgagttgtaccagctacaacccactacatacattgtgaaagttgaatttgggaagatattactttttccttcattctggtcctttgagattcgtctcattcaaatcaattaacgtcttgtaatatattctaaggcattggcgttatcggagatcaacatcgtgagagtaagggatgtctctcttgaacttgcacgtttcaacatcagtctatgaactttcgaattcaatcgttcaaggaggtcaatcaaaagagagaatcaggtctctatgacattgtggagctcgcagagaatgccgatacttctataccccgaagatatgatttgatttgcgtctcttatcgaacgaacatccaacatcggatggctgctccgatattggagcttcattgcaagaccccgtcactgctgtacagctccccactcggaagacccccccgatggctagtataccgaggcaatgtatgaatatcatatttaacagcttatctgccggggtgttgacaaattgatcttgctctaactaactaacattggccgaaacctgtgttcctctgttctcattccaacataatatgcgtcctgttactattactcgaggagcgaggctgaattgtctcaagcctcgcactctagatagatattcaaggcgatacttgaccatgctgaaccctcccaaattcgagaatgaaaagatggtgagcaatatcaaagtacataattgaactttgactgacacaaatcagctcaactacgccaaaggttctccagaaagagccgagttgaccaagacaatcaagaaactcaagggacaattcccgttcacaattcctatcactatcaatggctcagaggtatgttaaaaatcacggataccaacttgggacatgtaactcacgtatactagatcactactaaggaatcccgctcccaaccaaacccctcaaagcacagcgaaattgtcgcgaactacgcctctgctgccccagagcaggtcaacgcttccatcgatgcagccctcaacgcaaagcccgcatgggaagctacccccttcgaagatcgtgccgccatctttcttcgagcctccgagctcatcaccggcaaatatcgctcagaaatggtcgcagccacaatgcttggccaaggaaaaaacatatggcaagcagagatcgacgccgctgccgagacggccgatttcttccgccactatatccaagaggcatgggcgttgtactcccagcaacctagggtccaactcgatggaaactggaacaagatggagtatcgcccgctcgagggtttcacatacgccatttctccatttaacttcactgcactcggagcaacgcttattggacctgctgcattacttggaaatgtcgttatctggaagccttcggactcggcgcttcatgctagctggttgcttcatcaaattttgcttgaggccggtcttcctaaggatgttattcagtttttgcccggtgatgccgagcaaatcaccaacactatcctcaagagacctgagtttggtgccctaacatttattggagccactgctacgtttaagggtatacagaagaagatcggcgatggcattggtgccggtatctacaactcctatcctcgagtggtcggcgagaccggtggcaagaactggggcgtcgtccatccatctgcagatgtgagaagcgcggctttgaatacaattcgagcagcatttgaataccagggccaaaagtgttctgccaactcgcgtgtttacgttgcagagtctgtctggcccgagttccaaaaggtcctggcagaagagaccgcagctctcaaggtgggggatgtcgaagactatagtaatttcattaatccggttattcacgagcgttcatttgacaaactcaacaagttcatcgaggatgcaaagagcgactcggagctggaccttatcgttggcggaaaggcatctaaaacagagggctattacgtccatcctaccgtctatcgcacctccaacccccaccacaagattttgtccgaggagctgtttggacccattcttggcgtctatgtttacccagatgctgaatgggagcaaaccttgaagctggttgatacaacatctcgctatgcattgactgggagcatcttcgccaaggacccctatgtcagccggcaagcgcagactattctcaaacacgcggctggcatgctctatttgaatacaaagtgcaccggttctactgtggctcagcagccgtttggtggtagccgggactcgggtacaaatgacaagactggcactatggcacatctgcagcggttcgtgagcgctcgcacaatcaaggaagagtttgtgcctctcgaaaaagtcacatatccttcgaatgaggtttaaggagggaaaatttagatataatctatgacttcgaacgatataaattgaacttctgcatatctctacgctgtcttgaacatatatgttggcaataattcgacgctgatgcaacaacaataacaatacttcaatgtctttcgatattctttcgatatattttacgtatcattttacccccgtatgtaggtgagagtgaacatattccgatactaccgatgggactttcaaggtgaggtccggggctggaaagcgacttctgagaatcatcagatagcactgagttaacatcggaacgacatcaccgaagcaaattataaatgtacgcctgataacactgaaggtcaaatagtgcataatgaccatcactggccaaccccacttaggcacgtctatctatgaaacgtaacgcaaactaaaatacaacctcgaaccgggccggtgctggaacttgagcaataagactcacggagctgcctttctaccctatttacgatagcacaaatccccgcagaggcaacgatgagttggcatcgcgggacaggattccttgtccgggaacccctccttccatcggaggatgactccgatgcattaccggctgactatcagtgaccggatagttggttagatagtagcggtctgataaagtaatacagagatataagaagtggttgcttcaaaagtactctgcggtaccgacctagcttgaacggaagttattgctggcctgaactctttcatacaagacacaagcgcggcgctagactcacctgtctgcgttcttgactataaccaagatgttatctcgctctactcttataaaacctcctcatggtttatcggtccaagtctcaccgaacttagctcgtcgacttcattcgacaaaatctcacttccatgatgccgccatgccagcaatcaaaccgcccgtcgaagtctcatctatggcccgaatcccaacgaaactcttgctacggtctttgcttttgacttccttgatgacatccaagttattcttacaacctgccctagccgtgatgggcgtccttacgacatcgaaatcaccactattgaacccagatcagaacctccttctgaacaagtttcttcgctggacggtttataaccacttttgtgctggagtgaacagaaaggaagtctcgaagactgtggcagatatcaagaagatgggatatcaaggtgtcatattgggatattcgaaagagatagtgctggatcatgaggaaaagctctcgaccgacgaatatgggaaatcacaatacagcgacaagtgctatcagatgattgacgagtggaaggagggaacattggagacactgcgtatggttggtccaggtgacttccttgccgtgaagtaagtgtgaagccctagattcttgtcctatgggatctgatattcctttgctaggttgacaggtgccggtcctatttcagtgaacgcaatggcagcgcaaaagcctatgccagaggctatggtcaaagccgtggatgagatttgcattgcgacagaaaagcagggctcacgtctctggttggatgcagagcaacaagtcttgcaaaagggtcttgacgactgggcgattgaagtgatgcggaaacataacaaatcgcaaacaccaattatttataatactattcagggctacctcaagggatcaaaggtgaaccttgaccatcatcttaccttggctgcacaagagggctggactctgggtatcaagttggttcgaggggcatatattgagcatgaaacacgctctctcatccatcatacccaggttgatacagaccggtcctacgatctcattgcagacaccatgctttgccagagaatgcctgctggcaaggagaacctcccattccctaaggctgctcttttccttgccacacacaacgccgctagtgcaaccaaagcgattgccacgcaccaagataggcttctcgccaataaacctacagtcatgctggaatgtggacaaatccaaggcatggccgacgagctcagttgtgaacttgtgcaaaactacgaacgtgctctcgaacaatcatctgctgccaacttgactgcgccaaaagctttcaagtgcatgacttggggctcagtgtctgagtgtatgggatatctccatcggcgagcaatcgagaatcgcggggcagtggaacgaacgcagcacatggtgaccgcattgcgtcgtgagttgtggcgaaggatcgtcggatgagtcccgaagacattttagtggctaggtacttaatgcacaagatagcgaatcagactattgttactcaatatatccatgcgcagttcatgcacgaagccgaatagatcaaggcgaagtcaatcctgttagggtctcaccaatcatgtgatgggtcatgatagacggtgcgctgttatctccgataagtaaagtcggaagcgcatcccgacagattgaaccaactatctcgttcctaccccgcagcctgcaacaattgatatcggacagtcgccccggaagcatagactatcttcatacctattctatacagcatctcggcgtcctaatccggtatgcctataacacctagccaggcaagaacaaaaaagtgccagagggcgtaagtcatcttgatcaattggccccaaaatagaatacctaactcacattttataacaaagctgtgagcgatgtcgatcaatgaaggtcaaatgctcaggggtcagcccttgcacaagatgtgcgcggaagaagaagcattgtcactttccggtggaggaggcccgggtctccgtgtcggaacggtaagtagcgccaactagctgcactatacgtgctaatatagaactaggtacttgcgagagctagaggagcacatatccagaagcggaagctcggggcgacatggactcccggcaactcttgaacacagtctagggggtacactgtttacaggcgatgataatgttgatgttcctccgacccctcaagcatccagcacactgctagacaatcaagcagatattggatggcgttcaatgtcaatcggtatgctgtagccattctttcaatatgtgtctggtgtgttgatcatgggtcgttttcagggatggggccgtccctgcataccccagggacccctcaaagagatcatgagaccgacagtgaacaagacaatcaacgatcaaggttctctcgaaatcctttagtggaccgggatccatcgtttgcccaaacaccagatggccgattttgtgagtgttgagtctctcgtctcgctctctagctccttactgactgggatatcgaagggtatatggggccgacatcatcgtggtccttttgtcgtcgtgtccttgctttgataggaagaaaggtgccagaatcaaactgtccaccagatccatttcacattgatggtgtggctttcaggttgacctggcgaccatatcctcccgatgaagtacctgatgtcactaatctgccaccgttggactatgcactcttcttattcaacacagtcaagttctatttcggctttctttcttttatgattgatgaacatgcttatttgcaggatctccatgaattctaccgggacccaccagcgaaagctgcttcgaacagaccttggtactgtcaatacttacttgttcttgcattcggaaaagcattcttgacgcagaagaattcttctggaacaccgcctggtcatcaatacgcatctcgggccatggcactgttacctgatttgtcaggagttgacgaagatcccttgggttgtatacaagcacttagcttaggggcagtatatcttcagtcaatagatatgcgaagagcagctttccaacatgttggtttcttcatctctcactggtactgaagtatctaattatgtgaacagattgggcatgccttacgaggctgtatcatcgaaggaatacacagacatgtacccgaagatatatgtggaccggagctctccaaacgatgcagaacaatattttgggtggtttatatgttggaccgagaattttctgctttgattggcgccccaagttcaatcagagatgaagatatcacagttaaactgccagcagagatggatgattcggtagaacagattaatttgacattgcatgttcggctttcccggcttatggccactattctgacaagtgagtcttttggctgattaggttggatgcagtgctaacgaaatctagccgtctacggggttggaaacgattccgatgacaccctcgttcgaagcacacagtccattcttcatagcatggccgaactctcatacgacctgactgcctttttaaatgctcattttcacgggttaattagccgcgcttcgaagatggcgatccgattgatgttagcccatcatcatgtgggttttttccgaactactaatctcaacatgaactaacagcagcagtgtattgtacttacaacaagaccgctagtgatgtgcgcacttcacatgcacattgaacgaacagagagacaaaaatcccaaacgatcgtgttagcaccgcctgttgcatccctcttacaatgctgcgccgattccgcccagactatcctccagacccttcgtactttagctgatgatgacttgatgggtatgaatttactagctgttttgaatcacattaatactaattccaacatacagacgcattcttaccattccaaattgaagacgcatcgtcctctgcctttgttctctacctgatccgcgcgattgccccatcggtgatctcgaacgatacttggtgtgacaacctagctttagtgctcgataaactcattgcaaagggtaatctagctgcaccacttcgcaggcttgaactcaagcaattagagcaaatactcgcacctttgacgccaaaattggcaaatcattctttgccgcaagctaacctggatgaatataatgaaattaatgaggaaccctatagcttcgatcacgaggagtttgagtgggatctactgggactcaattcatcagtcagtctcccaccgcgggaattattggatcttgcagatcaattagacgtggaggggatcatgcaatctgttggggtttgatgtcttgcaatgatctaataaactatacgacttttcacaagaattcatgaagttcaaaattgcagaacaagcagagtctgttcttttcgtacgcgaagcgaatttggtctagtttacgacagtcggagggtccttgttattgatatttgtcagaatcaaggacgaaaaaatgacggtattcatcctagattctgacaatattgcaactagaaacttccttgttgactccgtcctttcgatcttatcgtgaaattgtcggaagactcacccgacgtttcttcagtatctcaaaagacatatcaaatagttgaaacaagcatcacggtcgcatttaatcttgttgatctacaaattctttttattcctctataatgtctcgtaccagaacaattggctgctttatattcaaccagtatgtcaacctttgctcgcaagcccggccagtatctaatttgactccaggacttggaattttactccgatcttacctcgcattgggtgccattcattgcaccaactgagaatgagttcctcagcaacggccgtggcatcagatgctgaaaccgcaacggcacaaaaaaactaccaagtagtccaagacactggcaatttcgacgagatccaagccaaacgcccagactttgatcattctaagcccatcgaagtaacaaaatcgccaaatcccaactgggagtatgggcaaggggtacccgacaatggagccagccggacgcaaaaacatcatgaaatcgacccttacgcttcagatcgcccgatgattaacaactaccgcctccttgtctcggggattgcgcctcgaccggtagggtttctgagcaccgtcaattccaagggtcaaaagaacctctccccatttagttacttccaagtcatcgaccacgatcccccgatgttcattgtggggttctcgtctcgacccggtcgagtcaaagacacctaccgcaacctccaagagaccggggagtgtgtgatcaacacggtgtcggagaacatgatcgaagcagtgaacgcaagctctatcgatgctccatatggcgtgtcagaatgggatataaccggtctacatgaggcgccatcgagtactgtaaagccatctcgcgtcgccgagtcggtgttcaacatcgaaggcaaggtggttgatatcaaggagttcacggatcaccaacagcctggcatgagccttgcagctactgttctcattaaggctacccggttctgggtcaaggagggcacggccaatgaggattatagtcacattgacttggagaagttgcggccggttggtcaacttgggggaatctcttatggtcggattgcgtcgacttttgagcacccgcgaaagaagtggggtgatgaggtgccgaagagtgagatcttggctaagctagatgctgctaggcctcttgaggaatgagagatcatattggtgcctgaggtgctattgctagcgttgtgtctcaggtgccagcgcctaggcatagttaactaatttcctacacagtcaaacaaagcagacttcgaagagtgttccctggtctttatataatagcatatatgttaactatatatactactattaattaacatcaaagatgttaacggcacgtagaatgagggatgtaaccccatattttaaccagaaaccaatatcagccacccccttttaatctcttcgtcgggacgaatcaacttcttcaattcgtacggagaactccgcacatcgaatagggttataagaagcggtacacaatctggaacaccagcccgtttggtttgtttctgtttttcttctctaagacattgtgtgattcacttattattcacttacttggagatttctcgcacacactcctttatatcccttctgatctgagaacccccttcactctttttatttcctggttctcatcaaatacattctttaactttgactataaccgaccaccatgctccccacactccttaccgtctttcgtcgcgactgcaatggcgacgaaaccatgtccagctgcacaaagcccaccagctcagcaataaccgttggcattcccgccgcgatatcaggggtgtaagtccattgatatacttatactatcgcccattcccaaccatggcagaactaactatatatcagtctccttatagtcgccattatcgtcctggtagtcctataccacaagcgcatacgtcgcgatgaccgcgaagacctagaagatcgccagcgcagctctggcttctatgctcgctacgcaacacagagatttggcacggagggaggaccaccaccatcgaaaggaggtgcctatgcttctgagtcgcggcgcagctctgccgattcaatctttgatttcaagcaggatcacggcccctatcaccttgctcagttcccgaatcctgaggtgccgaagccggtggctgctcgggtcgcttcgtagtcagtgcggggtttgatctgcttcttgctgtaagtcttgatggtttgatatgaccaacctggagttgggtgctgacttgcgttaggttcctgcgggtcaggacggtttcttcgattttcggcgcttcttcttatgggcgaacctgcttgtttccaaggttcttttgtccaatgtatgtaattttatgactttcgagcgatctgaagccataacgtaatagcgaatatttttttttcccactttacacaatattcacggcgggttggaacgatgtagataaatgtctgtgttcgaaagctaagactggtataaacagtaagtcaatagtacatttgtagatactgaaatcattttcataaataatacattggtcgtgcacaagacacgagaccaatcactcggcattctctatgacctggtcctccaagacttggtcactgcgctcgggggatggctcgaccgcaggttggacatggaaataccccatttggaacaagacattctgccattctggccctgcggtggcttgcactttgtagtaaggcgtgtccgtagcgaaccacctctctttgcgcgttgaggctttgtcgcctccttcgagggctgcacgactagcacgtgtcgtgcgggaacgcttctcgccgcgcccgttctcctgcgccgtgagtgcaaacagtctctcgcggtattgctggaggcggccgtcgaagaccatgatgccacggatatacggagccaagtcttccgtgatcggtgcgagtccattttcgaatgagggggcgtggcgggcggttggtgtagggtttgaatagttggcacgcatgataggttcaaagatgcgttggaattgagggagggtcgatggaggggtctgcgggggcattgcagaaatgatggctttgttcaagagtcgggtcgcatatgaagatgccagatcctcggtatttggaggacggaatgttctacttatcaatgcatcgaaggtagtgccgacggcttcactgaatgatgaatactccgttcgcagctctgtgtgcaggagtgggtaatcgtcaacatagttggatttatagccttctggcggtggtggggcggatatatcaatagcatcctattcaatgattagctggcgtttctgtggacttatcgatcaaacttacattgctcgcgtccgtggaaatattggagcaaaggatgtcgagagagcttctcatatcatagtagtttgcttcccggaacaacatgtcaagttgcgttgtcttggaaagagactgaaattgaccaggggacagaatttcaacttcattcttcccagccatgtcttcagaatcttgcaggctcaggccccacgattgaagactgttgtgaatgatttccgtctcttcatccaacgaaccttgggccacaataatatcacgattgagccagcccatatatcgctcgtatgtgttgaggctcagaacccggagtcgatccccatcatgatccacgtttgagccaggtggccaaataggaagtagccaatccaaacccgctttctcgctaccaacacccatctggcaccagaagtttaaattcatcagtgacttccgaagatccaatccggatccttgataaagtctggtaacggcctctctctttaaaatatgcccctcgttggcggcaaccaacagcaagtaatcgacgctgaattcgggagcaggcttttggtatcgtagtatggcatgaagggacatatcctgggtagggactaaactctcattgttgcaggtgatgacgatgggccgtttagattggctaataagagtcaggacaccactccaaaattgacgatcttcttcaaaaagaatatcgacttcttcaagcaggatcaaagattgtttttgctcccgggggcgtttgggtgcagtttcaggcttagggctaggttcgccagaccgggagaccggcttgctggaatttgaggatgagcctttgaaaaagctcttcagcttgttttgcttggcgaaatctttgttgtctgttgaattttcggattcgttgaggagatgaacaagatgattttgcgtcatatctccgacgcgttctagcatatcccgggcacttcgtcggcttccagcatttatctcgaaaacttcgaaatcaagttcttttgcaacagcatagacagaagcggttttgccggagccagccggaccgctaagaagaatcgcattggacattggattctttctttctactccaggtaaaccaggtgctatgtcgcccgaccggacgactgtccttcgaggtgttgtggtcacgccgcccgctaactcatcatctgagccagagagacagtccatctcagagatctcatcttcgcttgatacaatgaaaccatcgagtttatcggttttttggcgcttcttcgcctttctttcccgcttcaatttcgcttttgtattctcctttgatgattttccggtatccactgctgtgattttgagatgccgtagccagtctcgaagcacctgtggttcacggccaagctgaaggacgtcttcagctgactcgggggcgtatttgtgtgtccaaagctgtggttcgtaggttgcacaatcaaaagccgaaactgatgtgagtagtcccgatcgaagtttggcaagagggggactagcagaatcccaaggaaatttgccgtttggcgaggaccacgacatttgtctttccattgccgtatgcaagacttgactgctggcaacatgtcgtatgggatgtcgaagaatagccagggcatcgtagtcctgtttagacaggcgggcgatcctgcttgcttcagccgttccagctagaaggacgttttcgtcatctctaattgagatagctgcaatcttcgatttttttcggtcctgggcagtatgccagatacggtcatcaacatctgaaggtgagtgagcgtctctaacgtgcacgagatcctgcggtggccaaaggggatcaagcagttcgggaaacttagaaacacgacggggaaagctagtaaaggagcttcccgaagctgcaactacccgcttcttatctggtgccccagctgtagtttggcttgagggcacgctcacgctgctatctggattgtccgattgagatccattcaagctctcgggcccggatttttgtgctgatttcttgctgaaaaacgggtgtgtgggctttcggggttggctttccttcttgcacggcttaacggatggtatagtggcagggggcttttgaacggttcgactatcttggatatcatcgatcaactttccgatgttcttttctgtggcaacactatactttatcgtcaccaccttgcgctcagcttttcgcggcttccttcgcttccctgtaattcccttttttttcgcctcttgatgaggactggaggtgggtgacgacagcagccctccctttgaattcaatttgagaatcttctgccttgcagaggttcttgcacctcggccctttggtttctcgttctcggatggtgtcaatgattgagtttcatcttcaacaagttgggtctccaccagcggaccgtcgggtggaggtgtagacacattgatttcggtctcgggaggattatcggttgataaaggcgtattgttggtcacattataaccgagccattctgccagacctgaattggaaatggtagtggatccggttgtttgaattttgttcgttcttcgtctctttctccggtgttcattcaggtcttcgtcaagatccgcagaactctcattgtttatgttggagacatttgaattgtagttccccgggacctgaagcccctcctcgtgcgtggagctttggctgcttatcggtcgaggatcgtgtacgtgggaattcacaggcaagattggctcattcgagggtgtagatttgaccgagacaccaaattctagacattgtaagctcagagtcacctgtagctataggacacatcctgaccttgtcggaagaagggatgtatgacttgctcttcgtcggttcccatagccatcggtagatttgatatgatgctcatgtgaacagtcagttgatccctgaggagaggccagggagcaagcggtatctcagaaatagcattgaaatgacagaattttggtggtaagtgtggtgcgattgcatgaagcaagaactaagtcaaggccgatctccatagcttcagacacgtccgacgcgaagggcgcgttaattgcttatgtcaggctgactgccgcacgtaccaacgctagccctgatatggcttaggggtggatataccggcccgacgtaatcccgaaaatttttcagatttccaaattggatgggtctgcatggaaaagatcacacgctttgagggacaggaacttaagtcattttaaattcctggtattccgttcgtcatggatttgcagtccccatctgtcctggcgcaattgcctcggccccttcacgcttctactggcaaaacccgcgtcggggatgtcttcagtctcgccgatgcgaaaaaacgcaaacgctatgaagtcgcagttgccgtagatggcgaggctgtgaacatttacaacgtatgcttgctcattatccaatgctccctcagttgcatctgacactaatctttatcaggttcaaacacctaagctcgtgacttcctacgccgtcccaccgcaatctactttctcttgccgcccatgttcagttcgcaggaagctgtcaaaaaaatcaacagtccgaagacagacttatactgctgtcacgaaacccgaacatcagatcaagtgctttgtggaggagatcggcagcagcggctcaagtgctccggtcatttcttcttcgactaccaccgtgaccgactcgaccagccccactacttttgtgggaattgtgccctctagtaccgatgccgaaggagagacggatccatttgatatattggctgtccacgaggatggtcgtgtgcgtagactgtcgtcggatttaaaaacccaacgatggagtattcagcacagtgagattgcaaaggtttgctctactcacaatgttcaatccagcttcttggttgaatttgatgatgcaaagaaggctttgttcaaaagacgacaggatttggcattgctggcgctgggcgatctgacaacctcaggaaccaacgagccgtctatcttgcttctggtatcccaaccgaagaataccgatcgagtctccctcaaagacatcattgtgcagatgttctcagtccccgcgcatgcgaagtcagagtcagggttggacgaaagtcagcgcctacgccatctacaaactttccacatcccggatgtgagtggcctagaagccaccaatggcaatgctatgcaatggagcttccattctggctcagcaggattgagcctttctttcgaaaagggtttcatcaacgttgacctctcccagtactctccctgtgtcacatcgcaattcgtccttgaagatgaggaattctcctcggtcatgcgcatttctccccaatctgtgattggagcccaaaaatctcttgtggcggtatatgatactcagtaccattctgtgcagcgcagcattccagccggtgatcttttgtcaagcactgggtcgaccccagaggctcccacaaacttcatcagctacttcgccaaacttgggattgctatcgcaaccaagggcaatacccttattgcttttgacttgagctctctccctagtgcgcccagctcttcgctgaagcggaccagagatagcctgctcatcgatgctatcgggagaggtattggttcttctggtgcacagtgggatatctcatcaaagaagcaccgatctgacaacatggcctctcttcggcttacatcaccggagcaagttgagaaatggacacagctcacaaaaacggtggagaaggcgaccaagacgaagaacattgacttgtttgataatgcggtcctgacctacttcagcacatcggatgcctcaacgacgctcccagtgcgcgggcagtatgttaaccccgaagcaactcttttcttgctgtccaaaatattcgctgtggaggagtctgccacaggtgatacaatgtcggcctccccttcatctcaactccgtgttgccatgtggcccccgactacttgtgactggcttattcgcttgggacatctgtcactcgacaatgttgagattgcgctccgtcgtgcatgcaagccacgcattttgcagccattccccaccggctcgttcatccaggctctcctcgattcagatccctccttgaagcaggtcaaccaagtgcttgagggaccaactctgatttcctccgatgagttggcctacgcgctcaaagccttcttgaaccaggcacgctcgcactctggaactctcgaggaaacagctcgtgcgatcacaaacggtgatcttgccactcccacccaggaactttctagacagctaggggccgaaacggcaaccctaaaggatatattcgctggcctgaatacctcccttcaaaagattcactcgcagcccgtgtcggttgtcgttcattccctccgctccaatctctcgcggacagaacttatttctatggttcaccatctccgtctttccctcgctactggaggctacacttctcggttcactgaaaaccccccaacacctattactctcgaccaaattactcccactctttctctcgatgtcatcattgatctcatcactgcctctgtggatgccgtgggtccatccggttggatctcggccgtccccgcagcgggtgactttgaggactcagtcgctgccgctgctagccgtgaaatggaattgattgcggacatgaagtctgaagtctccgccgcgcttgcaggagtggaagaggcaacctatctcaagggtgtcttgtgcgagtacctccgcttcgcggatcaagttgacacccccgctactacctccgaggatgccctggccaagatggattccgaggccggtccatcgcacctggtccgctacgagaaactcaatggcgccgacttgcttgtcttcacccgtcccggcgagggagaggacggctacgatggcgatgctggtggcaaaatgctaccgctgtcactcaaagctgcttccaatgacgtgtcccgcactaagattaaaaaatccacgggcgaggtgaagcatcgcagcagtcgtgagattggttacttgcgccgcaaggcggttggcaagtactcattcgagagactgattatttaagagcatgtgcattccatattttttactgtaaaattcattcttgagggagacaatatcctaggagttagacagaacaatacatatgtgggttcccacgtatttcaattcttcatttttttttcttttttgggcaatcaaggacttctcgcccttgcgcgtgttaaaaatgtttcgacgatactattggagccagcacaatgaaattctcgagggtcaatgtatttggctgtttttggtagttggcgatctaccttgggagccttgcagctatatataagtgggaccgaggacgaaggattcatccagcactgagaaaagaagatcttttctaccgatccattgaataacattaagaacatcactaaatattacatagaatagaaaataggatcaactcaactaacgcttgtttaccttaaataaagaacaaaacagaactaagtgggactagtcaacctgttaagctacaaagggattcaatagtctagctcggatctgggggtttagagatattcttgtcccaggccagaagacaatagtggaactagggttaaatacagttgatagatctcaaaacgtctatactagtttatattattgctttctatagaatatcaatctgggcgggaggccaaaaaaggtaaacaagaaagataataaacaagggagagctctgagtggagataccctggacaccgcatctccgcactgttcaacccaccgttcaacccaccgttcttctcattccgagcaaagattagctctgatctatacgttttcatgtcgttggtgtcgatgtgaagttggtttggatccggaacgcgtaccggcatcaaaacaaagaaaaatgagtaaccaaccatggcttgacagtttgtcggacgactggccatctctagcgcccaacagtcctgtacctgttcctgccttaccggagtcgcctaaaaccagccagcagggaactcctagtcgcattcctatgcccgcgcggcgttcccaagaacaacaatcaccgggaagcaacaaaaaggacaaggttacccgaccatgtcatttccatagaagagaacctccgacgccgaagaccccccaaccattcaaaacacgcaaaccacgatcgcctgcccctggtagtttgaaatacagccctcccaagaccaccccagggccctacgccaaggaaaatctcaaggccagccccaagccgacgggtcgcagacagccctcaatggatgcgcgctcccctctacgatcggtttcaaacgcctccagagcctcctccacaacttccgaattcgacggtacggttcagatcaaatcgaagggcaaggacgcaaaagagggtaccccggaatggcgcagacgactagtgcgcggggaaatcgctgctggcgagcaacgcgacctgttcgcgccgataggtctcgaaaccgtgttcaagccgcccacaccccgtgctgaaacggaaacggcacaacaggcctctactccctttacgaaacaggacgacaatctgtgggatttcgccggtacatcttcgcgacaaaatagagacgaacataacagtcgcgaggatgatctcgaacgcgtcgccaatgaggatgtaagggaccatggcgaccagtcgccggaaggaacggtcaatcgcgctccttgggagaagaatgggggcctggacgtggattgggatcaggaagggctctcacaatcggggaatacacaactacggactgctagtgggttggaagatctgcgcaatgaaggaatcacacccataaccttctcccgcaataacactgttgatggcaatgggacttcggaagtcatcaagtccgcgctgaagcaggtcaccaacaagttggaaagcctgtctatcgaaaatgatagtcgcccggactccgctgcaagcgatagcttcctcttttacaaccacagtgaacctaatgcggacgggtctccacgagatgacagcttgctggacgcgacaagtcattctctaccccgggatctgtctatggggacgatggacttcagcagtcggcgaaaaaaccgctccttccctcggcgattctccccttcgccctttccttcccaccgtttgtcccccatcaccctcgccaactctaaaatccgcagttcacctctgttcaacccccctcacaagaccacgtcacctggtctaccgcatccttcctcgtctcatgtccggccggccacggctggagcagagaatgaggccaaaatgccgtcatcaggaagtccattgaagctgttcggtgaccatgacacattcactaataacagacttctccggcgcatgagccagtttgaagacaatttcagtgacacatcagaaggagatgagcccccttcgccctcggaggaagcgcgacgaaaaggcgagagccgcagctttttaaattcgagacacgagccattgcaggagatctcccctcggcgaaacgaacgtcttggatctcgcaatgctgtaaatcgaatcaaccaatttgggggtggcgagttggatacatttgatttctcagacactagcccctacgagcacaaattggtgtacgatgaggccggagggtttgggtcccgcccatcttcacgcaagcgatcgtcagcccggcaacaatatctccgtggcccctcacagcaaggattgtatcattacagcagatcagcgagctcaggattcactaggaaaccatctgcctggatgcgccaggatttctttgatgatgtgcgacacgggaatcggcccaataacaaggaaaatatggcccttgatgtcaagcgagtgccccgggcccccggcatggatcccacaccaaaacggcgccggacaatcatgagaaataatagctccgaacccaaacagaatgccggcggttcatctcagaagtatggcgacatgtcgctgttgcaacgaagtcttatgcaacacggtgtacagctcgacaatagtgactaccttgctccaccaggcccttctcactcaatgcagcgacctcgaacacctacaccaagccaaatacgaacagagggcgaaagccatatttcactgcacagagatttctccgaatccaatttcgacaataatgattattctgattctttttcccttgatggtgacgttccaatagtgaagattactgggaccagcgatacctcacgaaaaggatctatcaccactcaggattatttaaacgaagccactaagatcatggatctcatcagatccaaaggacgaggcgcagctggattgtcaagtctgcatgagtctgacgtggaaagtgaaggcgacgacttcagcgacgacgacgaatccacccgggaagcgttttctcgccctccgagccgcgacggaacggatcttcgcaagttgagagaggtgaaggaggtgaatccaatgatcctgagtcacctgaaaaaataccaggaacaagatgacccgaatgaccgagaaatgtccctgcatgctcgccatggccaggacgagggccaaaccgagatcggtgaatccaactcacagctcatccgattacatggaccgaggaaacgaaagactagtggcatgactgatgacacggcggaaaacatcgcccatgatctgatgactatcaacacacaaatgtccgggttcagcgccacctccgtacccacgggctcttcacaaggttcccacgtcaagggtatgctggcttctgatcttgtagcccacctgatcccgaatgaggttaatggcttcaagtatgaccgatcgaagaatcaatgggtgaaagatgaggcagaagaaccacatgcaccaatctccgaacccgcctcggaggctgatgatccattcaaagatattccggatctcactgtagacgagctccaggagatgttgagagtccagggtctcaattctcctacaaagaccgacgtcccaaccgagcgagagcaaaccaaggcccgcagtcctttggctgcgaacacatccccgaagaaacccgatgttcgaccacacaccagggatggagaaccttctcttggtgcaagctcggttcaatcaagattcactcgcttcacgtccagtgttcctaacacggggacaagagctacatcatggggcacagacgaagccgcagaaaggaaaatctccgagcaaggaaaacttgaagctcagcgcgacgagccattgtcctcgaagaatccccgatctctagggaaacaagcgcgtgtcgcaacagtgaatctctcatcgcccctttcgcgcccctcttctcggggtgagcctgataatggccagtccgacccgaccgcgaatcacacctaccacggaattgtgccagtcgaggattcagccccagcggaccacgaaaatggatcaacacggttatccgttcctcccacggggcgtcaaacttcagttggtggccagccgtttattcgacgtcctatctcgaggattgaggagagaaacgaggagaccgtcaatgaccaaagccttgtgcgcaggaatgactcacttggtgtccgaaagacaccagccagaaccgaggcagagcattctttgatacctctccaaagtgccgggcctgacacgagctacagcttccacctcagtccacttgcggactttaccgtccaccaagctgataaacccctgaaccttgaaatgagctatgtggctcatcgtacaaacccttcctctttgcgacaagtgcacgggactttcgcattggcaactgaagatttgatcaagcatattactgacgtggaaccatatgagccttattgggaacacgtgcgccgccttgtcttgcgcaataagggtttgattacgttgcacaagctgaacgaattctgtccccgcctggaagagttggatgttactgataacgacattggtcaattgagtggcatcccctcaaccctgagaaccctcaagatccctcgaaattgcctctccaaccttactccatggggtcacatgatcaatttgcagtatttggacgtttcaggaaatgatatcgagacgttggatggcttcgcaagtttgattcatctccgggaactgaaggccaatgacaatcagatccgcaacatagacgggattatttatcttaatggtttgctaagcctgaagctgagcaacaactctatcactactgtggatttcgaagggtccgagttgacacgccttcgtgatcttgacttgagccacaactgtctaacatctgtccggaatgtcgaatggcttccgtcacttgccactctcgatgttagtgccaatcagatcagcggctttgactcgtctgcttcccttattagtctccgcgccctgcgactctctgaaaatagattggaggctttagatgcacgagctttcccttccgtgagccttctctaccttgatcaaaaccacctttctaccgttattggccttgagaattgtcacaatctcgaggtactgtctctccgagagcagacagcgtccaaagaagcgtctaaagaaaagaaaattgaacacaggttagatattgacttgggacttgtcaaggatgttcgcaaagtctttttgtcttcgaacaagctttccgaccaaagtgtctgcccttctgctccgctactacgacttcaacttctcgatctagctgcatgcacattgaagagtctcccgggtgattttgctttaagcttcccgaaccttaaagtcctaaatctgaatttcaactcggttgatgatgtggagccactgattggaatgaactgccttgctagactgatgatcgttggcaatcgtctctcaaggatgagaagaatctgtcagattctcagtcgactaggaaaaaccggaaaaggaactgcatgttctttgcgcaagcttgatatccgtgggaacccgctaactgttggcttttaccccccagcggtgactgggagtggcaattcggatcgcaagaaattgaagtcgcaagaacaagcagtcgtccgacaccaagggacccaccgggacctttctgatgctctagctgatctggggaacgatgaccagagctctcaccgtgccaccgtgggcgatcagccgacagacagagaccccgaagtcgacgacccatacacacttccgttcgctgacccgcaagcggatgtgaagtacttaacgcacctcgatcagtccacacgtctacgccgaagagtgctagagctcttgctctacgccggcacgagtggctctctccacaccctcgacggactagaccttcggccctcgctgggcgacgagtcctccgacatgaacaaggcgtgggacagattggagaatcttggtgtattgcggaggaaagcgatcaaaaattaggctatattctttgttattcttctatcgagtttttttccccatcatgcgaaaagcgcgcgtgatttgagcattgctggcggcgtgcatggagttttgttgtttctcgagttggaattagccttttatgtttgtacagcatcagcgcatcaccggagttggatatcgaatcaattctggcattttagcatttcttattgttgcaagctgttcgggctttttgtcttattgtggtacgccataatagaatgagatagagccccatgcttgatctacgtcagaacttgtctcgctgtgtggtgaccttgtcttacggcctatacagaaataagcttacaattgccccgaatttggctatgcaagcccccaggtagtaagctcattctcagacagcaatcgatatctctcttcttctagtagcacagctccccgagtgatatgattttactagagcagtggggctctgtggggttcgggccgacccgatgaaaggattgcaaggacttcctggtggctaattaccaggaacagtccacttggcgggcgcgcgatattaaatactctggaggtattcaaaaatttgaagaagcctgggatgttggaataacaatgtgttagtaaggaccgaggtctcttgtattgcgaaaaaattaaggatgaaatttagtaaaaatagaaagaaaaatacatagaagtatataatccagcgtatgtagcttaataacagaagtcctgctatataggctgccaggtcaggtccggacaccacaatccgaggacgtcaaattatttcttgccctgaacaagaagttgcttctgcttcttgatatgcttgaccacttcgatatcgatcttcaagacgttggcaacagtatcagcaggagtcaacgccagccactgggccagggagatatcagcgacgcggtcgctcttgtagagctcgatccacacgagtttctcggtctcggaggtgttctcgatatagtgtccttttaaagagatttagcatattgactcggtattgggaaaatggagaagtatacttaccactgttgtcggggaaaacaccggtgtcacccgcgtggaagtcgaaggtgcgagccttggagtcgccaatgaacactgtagcacgggcttgaccctggtggaagtagagccattcctcagcctagatggtggttaatataggtttcttctcaggcacttgtgtgttgtgtaaaaacttacattaggatgccagtggagctcacgaagacccttgggctccagttccacaatcgaagcagcaagagtctttgagatggggaagttggtggaatcaatcttgcggagtgttccgccgtgaccagggacaggctcagaggggtgcttgtaggtatggtagacgtaggaattgtcacctctcaacgtaccctcgggagccttgtcaaggtctttgctgacagtgccgttgaggatgtaagggaactttgaagggaccgagtcgaaaaccttagggtcaacaccaaagttcttggcgagaatgtccctgggggtatgggcaatccagtcgtcaaccatgaaggtagtactttttaattagtatattgagttttcaaaagtgtgaatggagcatacccaatcttctcaaagtcaccatcatcaaaagcgaggaggtactcgttctcatcgtctagaccctgcacgttatgcgcgacacccttagggaaataccagatatcaccggtttcaagaacctcggtagtgaagccgccgttttcatcaacaccggacagcaggagcgagccgttgtagacaaatccccactcggcctgtgtcctaaagtaagtcaaatgtcgtagaaagtatatatgtgcggccactaaccgtgcggtgccagtgtagttcgcggatggcgcccttcttcagatgctgttgggcacctgcgatgtcatggctctgtggcagatcctgaatgacttgctctcgagaccagccgcctgggaaaagccgagtctgagactcagagaagctccacttgacgttgggcacaaagccattatcggtactggcagtgcggaactggtctgggttttgaaggtcgagcactttgttcgttccgcctatttagagaaagttgtaagcatgaatcactacggctagtacccgtgaagacctcttccagccttaagaggcttacctagaatcggcgctcctttggcaccgctaatcggctggtcattgccatcctgcctcttagtccgaggtactgcaaaggcagaggaaacaaatagtccaaagagggcgaggctttgggacttcattttgaatgaaggaaaagaatgtgcaaaagaatgggattggactgagatgcctcaagccaagcacgacggagtcatcccagttatatatgacaattcgacactaacccaacccctccaaataccgagggggcatagacctccaggaattcagctagtttcaatgtgccgctccctagttcctcggcgttgagatgttgatcctaatgaaattgaccagaacacgagttatcagaaagtataaacagtcacaagagatgatgcaatccaggaagatctactccgtattccgtatccatcttgcctctcacggaagaggttgcaaaagaagccatcctgaatcgataatagaccggaaggtacggagtagttctccgtaaaagaaaactaagcatggccaaggatataacaacattcttggcatcatgtcgaaatcgatgccgggtctcccgtgctaatcgtctctgtggggaaatagacgatgtcgatccagggacctgacaggtaacttgttggtcacgggacttgaaagtcgaccctggatcacctcatcggtaccttgaatgagtacatagatcccacatttcttggcaggcgcggatcattcctctactttgacctctctggttgctagtctcaaaaataacttgacatttgctttgacctctggaactcaataccgttccttgtttgagtgttgagtcgaatgtgagatttggtgatcgtcgagggcggttcctggaccttgcctattccggaaattatggattcccttaaccctagttcgacgacccgttcgtccacaacgcatcaatggcactgatagacagggcgaggctcagtcccggtatagatcggatttggttttgggtttgagctattgatttcaacttgcagtctctctcaactttggattaacttcaatcacgacatcttcttaagattaagaagaattgacttctcagaaaatatctgaatacggggaccacaggtccagcgtcagatcccgagtcggggattgttcggattctcatgtgggcgttgaggtatgaaattcgccatttcgcagatcagcgtcccctcgaggaatttggaagatcacacaaacccaaaatgagacttttttgcgtgctctatgctgatattgtcgagatggctcaggggaagagcaagatggtacctcaattggggcgagatgaaggcatacccgggtatataagctctcgaaatttcccgcaaatatgctcatcaaaccaacgcaatcccgctcattctctctctccaacaagatgaagtactctattgcttctattgcgtcgctgattgctcttggagagtgtctttctttgcctcctctcatacccactattcctggagtgaccgaggctttgacgaccaacgctcctcctttgccgattttgcaagtccctactcctccactggagagtcctcccttcacgcccagtgacatcaagccgaagaagattgggtatttctggactggctcaggcgacaagttccataaaggtatggatctacgcatggtggattgacgagaggagatgatgctaattatcattggtagacttccttgctacctatagtttggatgatgtaggccaatcctaagcctggtacggagtcatttgaacctaattgctgattcgactttaggacacctttggaacccttttatgggtcacagatgtgcccagcagtggcaatgacccccaccacctgggaccgtcgctggatggaaagaccatctggggtggtggattactatctctcttgaagactcaagtatgtagacttcttctcaattcgcctttcacagcatatctaatccttcattaggatactggtttctactttgacacctccaacccttaccgccccaagttcttgaagagtaaccgcggtatccttgcatccattgcggatgaggttcgggcaaagcccgatggtggatttttcatcacctacatgggctcggctgttggtacctcgcctggtcgtctcatcgagactgatgccgactttaacatcattcacgaatggcccgaggatgtggaaggtactctcaacattcttgaacagcagttctcccctcacggactcagcatcgattgggagaaaaagctcattctgacctcggacttcgttgaaccgattactatcttgaagccaagtctcggagtccgccgcgccgatacactgcgtctctgggatctggactctagaaagattctcagcaccctcacaatccctaatgtaagccagcccctgaactttaatccgcatgcatcttctaactcgatcagggtggtggtatccaagatgtcaagttcattcccggacacccggaatctgctgctatcgccactgccgtgcacctgggtcagctttggatcatctaccctctgcgaaaggacgccaatggcaaacagggtgtgatcgagcagctctacgatcttggtcccaaggcccgtgacaccattgccatctagtaagtagcttatctgctgtataccataagaaaatcattgctaacaacatcaccccacagctccgacatcagcaaagacggtaaatacttctacgccacccttaccacagccaaccacattgccgcgctagacattagcgacctcaacaacgtcaagcgtctggatgaccccgatgaggatcagcctaccgtcggacctcactatatcaaggtcacacctgaccagaagcacttggtcgtcaccgactacttcgtccagactggcgacattggtatcatcaacaccccggctgacttcaaggcgctctacatcgaccttaaagaggatggcagcctttctttcaaccgctctattgacttccccaaggagttcgccaatcgtggtggtgctaagcctcactctagtgtggtctttgatctcactgaccctgagaatcctatctactactgagttatcccagtggccaatagtaggatataggacactgtcgatgtgaaatggagatgtgaaatggagatgatgagggcgggatataattttttctcttctgaacttgacataggccttcgggcgatgtattttattgtggatatactacagctacttcttagttactactaatggacatccactgtactttttttggtgaagaaaatgaacctaatattacacagacactttactgggtattgaaggtaaatcaaaagtgtgaactagagtgtagtatcatggagggaaaaaagcaaatcaatataaagatatactcattagagccccatggctaaacttcatgcacatttgatgtagcaaccttcgggctttcatctctccgatgccgaccctcgatctgatctggagacactgacgtactaacccccttgcccacaacgatatcttcttccagcacagcgcggaattcctcgcgctttggcagaaggtaccgcacatccacaaatctcaaaatgctcgtcataataatcacaagaaccaacaaggccaaggcagactgccacccatatttatagaagggtgcctgactcgcaggccagacgaggacctgcgaccatgaggagatggcataatacccagcaacagcaacgccgaccacaagagaccgcgcttctggatcctgcgggatgagatcagaaagccaggcaaagatcaacggcgccgtgccgagacagatatacgagatgaagtatgatgcataaacagcagacaaacccaccgacagcgggtgtgtagtccaaatgctcatgataatacacgggactatcccgataaccgcttgaataacgatgagtgcccaacgagtttcaaagtaatcggataacagggcccaaatccacacgaacaccacattgatcgccgatcctccgatggggatagcgttgacttgcgagacggtccatctcgcgcttccgtctgggttctttagcgatttcaggaacagcccgaaataaacatatccgtatgttccaagaaccgtcgcgatatatagaatcgcgatgaagtagacgacccatcccgagaacgtgcgcttcacgccggcccaggtcatcttctttggctcggcgcggccgttgcgcgccaggcgttccagcgaaagctcgccgtggactttcttgaaccaaaacgcgcgcgggttgggtctgttcgggagatcggggagcatgacgaatcctgcaaatccccaaattaccgtgatgatggcgttgatcacgaatagccagcgccatcctgctaggccgctatgcccgtcgagagtgtcggtgattgcggcttgcatggcgcccgagagcatttgcccgactgcttggcaggagtggtagaagcccattcgcttggcgagttcggttggggtataccagtgcactgtagggtggttaattcgggtcaagaaaaaggccttggaatgacatactgaataatgtcatcattcctggccaagcgctactttcgcatagaccgaggaagacacggatgatgtagacttgtttcgcactcgtcgtcattgcgaccaacccggtcagaacaccccatgcaatctccaagcctggcagccaataacttgggcgtacgtaggtgagaatgacttgagagggaattagcattatgcagtaggcgacgttgaagtatgttgtgaatctagacagtatcagccatcaccaattctgaagtatggatgtttagggcaactcctcacagattaagctcatttccgagcaagttcaaatcctctttcatgccagacacgtaggcattgttgatattctgttgatcaagatatttgataactgacagaagtcagttttgccgatctcaagccgtggggggatttgtatgccaacgcaccctgtgaaagacaaccgaaagtcatcaggaacatatcaaggcgccggaccaaggccttttcctctggagagcggaaatcgacatttgtcgacgctttgcgacgaaaaattttgaaggagaccatgattctggattgacagggatgagagaaaagccaggattcttgcgacggtggctattcatatacaagcccatgcagatccaagctgtgataagctccctgcaacccctcagagataggtcacataatgtggacaaagtagacatcggatcctagatccgacaaggattctgcgagatgcacgcgtgataagcattcgcaccaatggttgtattcctccattgacctcggaggaatgccggagtcgttgatatacaagataccaggcatgttggctattcaccccactttccacaaatgaatttggagataagttaaactcagaataatcctatcaatcagaagctctagagaggagagaaaaagctttcgggtggatgtccgtgataggagaaccacagcttccccgcatctctgcgccgacagcggtgaacccgagactctctctcacacagagctatatatattctcaaggatttacggaaatcttgactcattgcaaattggttgaaatgttggttccgaatatcgcgacaagcagaagcctgccaaatcccactccttgcttgagttactggcagcgaacaactcgagcatatccacatttgtatgcgaatatcgatgcaactgttccatcgaactcaaaatatgtcatcgtgggatctggtatttctggcggtttgacggccttcaaactgatcgaaggaggggccaaggccgaggatatcgtgattctcgaggcgcgagaggctgccagtggtgcgagttcacgaaatgctggacatgtgcgaccaggtctgtcaggcttcctttggggttattgcggccatttctgatttggaagatagatgcctttcggggtttcagtgcatattccaaagtgcatggagagcaacaagcgttgaagatcatccaggatgagcgactcgtcctagaaaaagtcgatgaatttgtcaaaaagcataatgtggaatgcgacttcaacttgacaaccacgtttgatgtctgcatgacccctgaatttgcggcttacgaggcagagagcctggaagcgttcaagaaagcaggcggtgatacctcgcacatcacgttctatgaaggggaagaggcacagaagaagaccagagtccccggagctgtagcggcctatgaatggccagcaggctcaagccacccggcaaagcttgcacagtttcttcttcaggcagtgatatccaagggtgcgaagctcttcacgttttgtcccgccactgaagttgaacggagcagtgacacagaaacctggaagatacacacacctcggggaattatagaagcagagaaaatcattcattgcacgaatgcccatgctgccttgttgctaccgcagttggagccttacattcggccaaaccgcgcgcaggctcactctatcgtgcctgttccagctttctctggggaaaaggctctacagagcactttctcgctccgctatagcctcctccacttctactccttgattcaacggaagggagatggcacaatggtgctaggcgtatcgcgatcaaacccaacaatgagcgctgagacaagggctggtcgattcagcactgatgattcccggtataatgaagaaattgccgaagaagctttgcggacttttagtcagatgtttcctgcttattcatcccaggctgccatgcacggtgagggcctggatcatgtttggactggaataattggcatgactacggactctgttccgttcgtcggggcagtcgattccctccctgggcagtatatttgtgctggattcaatggccatggtaagttttgcttttgctctactacgttttgaaagcggacgtgctgactggtaataggtatggcccggatatttacatgcgctccgactgtcgcccaacttgtacttggcaagacctgggatgaaacggggctgccagaatgtttccaatttagtgaggaaaggctcgcacggctttcaaatggagagttgccttcaatttggtagcgaagtgctcatacccgggggccggaggattgtctgattggctacaactagagcttcacgggcttggactctttcaaatatttagaatagacagggaaaaatagaaatcaagcctttgagctgatatgtaacaacatatcgcgatactctaacactgcaaaggttaggtgagtgaagagacaggggtgcagcttagtcaaattaaaacaaagtttcaggctgctctttcctaattcacactttccccttacctgagtatttcatcacatcttaaggaaagcagcctagaaccttcattaacttattggcattgagttggaacaaccctagaagctccttccaatccccaaagtggggcatcggaccgtcccgaaaggaagcttccgagcttcaattccttgaagccaaattgttcctcgaaacttcactatgattggccaacggtttacaagtcgcgtcacaaagcgcgcattcatttcgctccgtacgaaaccactcaacctccctcctacaggccctactttcgccatacccagccacgaagtcgtcgatgaagaaagatgtccgaactatattcccgaacactactatctagcaagaccgggcgagatacttggcaataactaccagttgctagcgaagatcggctggggcacgagttcgaccgtatggctagcacgagatatcacaaggtagttttggttctacgccaatcctgtccgaggctaattggagctgctggattaccagatatcgatggcagtccgagcgaacagttgctttgaagattttgaatagctgcgatgctaaatctgctagtgaccttcttggtatcgaggagactgttgcacaaaagaacccttcacatctgggctattatattacacgcagctgcctggaaagctttgagcttaagacgtcggacaaaatgcacctttgccttgtatatgaggcaatgcgagagccaatgtcaatgtttcaaagacgcttcaagaaccgcataattcctctcccgattgcgaaggcatatattcaattgcttcttgtcgggctacagtatttgcacgccgagtgcaaaatcgttcatactggcaagtgatattcgactcaagcaatgttatgtgaaaaaaaaaattgctaatcagcaaattcgctctagatctgaagctcgcgaatatcctgatgaccttcgagaataagaaagctatcccaaggttcattcaagaacaagtcaccaggctccccatgcactacaagactgatccaataaccaatcacaccacataccaaagctatcacggtttcggggcaatggacgttgaggacgtcgggaatgtacttccgagaataaccgatttcggctcagcatggcagttcgtcgttgacccggaaacgaagtcacaaaatgaagccgtgcttacgtatcctatacaaccgagctactaactaacaccgtgcgccggaggttgtccttggctatggatgggattttagcacagatatatggaactttggtgtccttgtaagccgcgtgaatatcgatgcgcctattcagctgtcaagactaactcaatggttccaaaggtttggaacatcatcgaaggcacagagctgtttactcaggttgaagatactaacggtcgatatgatgccaaatcacatctggcacaaatgatcgctctgcttggtccaccacctaagggggtaattgagcgagcagaccatatgtcacaggtagacttccctacaccaattaggattgaggcgggaaagctgtccaagaatgcccgagagctctttggtggtccttacttcgatgaagaaggtaagtcttctactcgacgtatgagtgttttgactgattgttggcgctagggaaattccttcacgaggaactcataccaagtcgaaaactggaggatacaattccatctcttgatgactcggaaagggaaattttcttgtcgtttgccagggacatgctcacgtggattccatcggagagaaaaactgctcgtgagctgatggagcatccattcctcaatttcggtggacatgtttctaaagatgccttggaagggcgctcttagaatgcgagctgttatatccattgatctcgggacactatgctgcttacagtttgtcttaccgtcagaagaaagctctccactatgtatgaaatctccactatctacggttattaaaaggactttcatgtatattgtcatggatatgcaaatcgaggttaaaattatggtacatgcttcgcttgtaaatgcagattactatcatgatatggttggaatgtccggttcagtatatatactcccgggcaacggtctcggtgaacgacctcaagaggaaatccccggagatctcgctctgccatgggctcaaataatatgaaaaaaccagcctctcctggcgggtatcaggatcatagggctatatcggggcaagccggtcacccttagtattatatccgagtccgagacaagcaatgctctctttctcagcagggttgtcgagtacgtgctcacagccgacgtacaaccccttattatatagaaacaaagaatcaagatcgaaggaatcacggcatatattcatagcgccgccaattctcctcaacccaccacttcgccacgtgtgccgcgtcgttaatccactgcacagcatcctctccatgctcaggcaagaccatgttcatcaaatccaagaggttgaaatcctgcagtgcttggagttcatgcgggtcgatctctacattcgagaacctccactcgacgtcaggaatgagtggtatgacgagacggtacggttttgcagcggaacgcagggcaagccatgtcccgccggtgttcatgactgagaactgccagtcttgctttccgtctttttctgggattgtgggtcggatcattgattggccttcgtagagggggaggagatcttggatggcggattttgcttggttgtcgagggatccggattcggataggatatcgaggattgtggggaggatttgcattgaggttactcgggagtcgatctcgattggtggtagttgagggtgggcaaagactagagggacgtggaagctggagatgtgggggttgtcgtatggggtaacgccgctgttctcggggagtgagatgccgctgttgggattagattcaatcgatcggagaatgttggagtttggttggcacttactgatccccgaccatcacgaccagggtctcgttggcaacgcccgtttcctccaggatgtccaataactcggcgagccatttgtctgcaacaccaagcgtattgaggtagcgatttaccttatttttctttcccagccagccgtgactgatcaattcttcgtacttgtgatttggtgtgtcccaaggatgatgcgtaatgccagtcaagtgcgagatgaatagtcgttctttccgtttttcggccgatttgattgcgttgcggtaataatcccccagctctgtttcgggatatccccagaaattgtacttcactggttgaagaccaccctgcttggcgcgatcctcggaaatgttgatgtcggttaccttgtgcttgaagcccaacgcaggtgtgagaaggtcttggttgtcgtagtcgtcagtgatggactgcatccatgtggatcgccatggccaagtggtatagtcctccgttttggtccggttggcctgagcgttgagtgcttccaggatatgcggcaggcacggttggtagatgtggtacaggtattcgcgattgaagtccacgaccaagggagcgataccgcacacagtcgcgaggatactcttcaaggtaaaggtatcgcctgtataagcgttggtagcatggaatcctccgtaaggctgtacagtatcgtttccattgaacccggaagaagtagctgttagtctctctgcggtgggtgttagattggctagcctttcttcaacctcagcagggatctggccattgtatgactcgcgaatcacgtccccaaaccaggattccttgcgaagtgggaagacgtctgcgcgagtgctttctagcttgagaagtaacacgtgtttgatattgacactgccgctttggagagccttgcggagaggctccagaacttcattttcaaggttggagatatgaatggggtcatgtcttggatcataatgcaggcgcgcagtgtgattggcattttcataccagtcactgaacccggccagtttatcccgtggcagccagtcaaatgtgggcggtgctgccagggctgtgtgatttcccaaccaactataatcacctgtcaattcaggtaaattaaccgatgacggagcgcgagactgattcttgtcgaacggtgtgacaatgacagtatcagatagaaagctataggcggcatttgaagggcgaatgcaacgcaaaataatcacaaggctagtgaatgcgagaacaaagacccgcagccaaggggatcgcggagattcccctgcatttgcttgggttgtttcctgagagcccgaggtcaactcaatagcacctcgaccctcatcccagtcctcgggtgcgactcgctcatagctcttcaagatcggagaagtttgtttcctgcgacaggcggacggcagaacactcttaaagattgacgcaattcccttggtccaattgtatagatgtggggttgagaaacaggatgcggcaacgaagacaacctccacgatgattaaacccgttaggccagtgagcagtgttttgacagcagccttgtcgccgtggaagttgtgcgcttgtttccagtggatctcggctcctgttgcgacgtagaaggagatattggcggctgatagaccggagattgtcaaactacccaagaaattcatttagcgatggtctcactcaaccctatgggaactcgtacctaagtgggaccaccaacaaggccgccatgacacgtgcccatcggcgctggtaatcagcacacaggatgtgagcgaatgatacacacactacatcttgtaagaagaatgtcgggccccagatcatcaattctccgggagataatgagttcagatgcgagtagatgtgaagaatcttggcacagatcacggcgatgaacaacagagagaaccaatacctgcgcgagactggccaacaatgatcgaaccaaaaggttggggagaaagctttgcgtagtatattgcgcgagccatctcgggtcatgaacctagagcccatgttaatttatatatgtagtttgtgccgatctcaggcatgacaatatagagaaaaggtcaccacggtggaagacaatgaacggtaaatacaaggaagagaaggggaaaagaataagaaggccaaatagaacccggcgaaaggggaaattttaacagacagctccgaaccaattccaaaaataaaaatccagtccaatccaacatcacaccgtccgagtctccgattttcccgcactttcaaggcgacagtattccgtagctcttcaggagtgcttcagggtccaccggtctcacgtgggtaggacataagctttggcacttgttccggaatgttcgcctgtttagtcatttctatttctaacactcggaaaccaatcgcatctcgtcaagcggagcttatggtgactagtccagggatacgagggtcaggccgtaacttagtgagctgcgattcccttgcgtgaggtctccttgcgttcagcccgatagttatggcccggacacataactgtgttagcatatgacattgccccagtgaccagtcactaatcgcctcgtagctcgtataaccagtttggttctgctgactcgcttacggattcctccgtatcccgcacaggaggctgagccactgtccaagattctaggctacagcccaaaatataagcaggtttgaaatttgggtgcgttggcagccacgggcttacagatgatctcattgtttttgtgcgagaaaagagctatgtaggcatagcataatggagactttaatcccaagcacatgatgatcatagtttagcttccgtgccgctctggggtacagaagcctgaactttgtagatctgtgcagtctcatgaacaggtgcttgtaataaacgatgttcctcctaggcaacactggcaagatgattcaagggttctcataggttatcacgaatctaattttcatccatctatcttcaggagttcaattctgaaacagcaaggaaaatttggacgccactcataaggagacctaaatagccgaggccccaccaatcataatcctcgggtttccaaatgagagggataatatctctcagcttgtctaatagttctagtagttagttatagggcttagttgactgatttagaaaatcaatagtcaagagtgaacacctcagagttaaagaagattgttagtaagctgactactcggatgttaactaacttgcgggcctaaaacaattagggctgcctattttcgaagatcaccatagaacacatacaataggcaaattccattgaccgttatgatcgagaaccccgtctcaacaacagtatcctatgtatctcatcattcttccctctggttctatagtccccatacatacacccttggtatgtctatcaatatattgaaacttgaaagtgcaatttttgtatagaatatagttgcaggtctagccagtctgtggccattcatttcgacatgtatacaaccccacccctcgagggccaacccgcataatgcacacttccgtcccataattcttggactctctcctggaaaacaaagttgaaaaaaaaatacaagacataatatgtactatatctaggatagttaggtattcgattttataaagcgcattcctaagagtaaatttgcgttgaattcctcactgtgtcctcttccatagtagggacgaagtacgaataaaacaaggctagagaatctcacatgtagccttccagggttggtccactcctgtcaacgtcaacccaatgatcgtcgacgggaacctccgcacgttgtagctaagactgcaccaaccctcattcaggctttaactgtggagcatgacggtgtatgtctctcccattacccaatcccaggtattgaagctgctacaaattgacgggacaaccggctgaagaccattgaatgatgtctgtacattagtacaaagtactaatgcgtatttcaacagcctaacctcttccctttaccccttttcatcatcccgagaggaccccggaccagacaccgaacaatgccgcaaccactagagatcgcagtggtaggttcatctatcagttattctcattgctattctaacaatttataggatcctgacgtctacctccgaccaaactatagcgatgattggcattcgtaaatactcgcatttcccccattcaatgtcatcgacgtctcacacgatatgacatagggagaccacgtctatcggttcctcaatctatcatggcctaatggaaaatggcagacggtatgtttcatcctacatttggcgcacctgggaggtcgacccgttactcatatacttattatctataggtatcaaactctgagcgacagagaatatctgtatgcatgttgcagcatcttccaccaaagaaattgccaacttatgtccgattctcaccagggttccgtccgatgacctagcattcgagtcctatgaagccgggtacgtacgaccaacctttcttacaccatgattatcactgacactctcagtcacttgctcgcgctcgtattagattcggagcgagagaacccgcttttcagagcgcctatcgagaaggaccccaaacatatcctggatatcggaacgggtaagggtaactgggctatgtacgtcaaaagagaaaaaccccctccctcgtcgacaagactcacaccaatataccgcttgtatagtgatgttgccgacatgttcccatctagtgagtgccaatccccgaagctcagcaagacagtgagctaaccccatctagcgactgtgcgaggagtagacctcttcccacccccaatcacatggatgccgccgaactgcatcctagaagtcgacaacatcctagaagaatggacctggagagatcccctcgacctaatccacatgcggatcatgacgggctcattcgatcacgcgggatgggatcacgtttacacaagctcctacaggtaaatgccaacacctaaatatccatatccgcaagcatatgcactaacaccaggactatcgcagaaatctacgaccaggaggctggatcgaacaactcgaaggcagtacatgcatcgactgcatcgacgacagcctgccggcagatagcatcctgcgaacctggggcccgaccatgaacgcgtgcggcgagcgcgccggactcgcgatggatgttctcgatgccatgagcgacagaatggaaaaggccgggtttgtggatttgcaggagaagtcgtacaagtggccgatcggcccgtgggctcgcgagcagaaatataaagaggccggcgttgttaatttccagcattggctttctggtatggaggggtggtgtatgtggctgcttacccatttcggtgcgccgcatccttggtcgaaggatgaggttacggtttttttggcgaaggttcgttcggaacttaagaatccgacatatcatatttaccagagagcgtgagtttggtcctagccctgtggtgtggtattggggggattgatatgctgatttttgtttagacgacgtgtgtgggcgcgcaagccttttcctggagagcttacgcctgagacgactccgatcaaaagcgacgaagagtgaatgatgtggaatgacagttttcttagcgagtggatataatgataatgtataggaagggaactgaatcaagatctttgaagatgcttacaatggatatttccaatagtctcaaatttgtgatagacaccctaggagaaaacgctactatacagcaccgggtgagggtcaaggcggtttaagcctatgatgctgatcttaaaagctataatagtcgagggtgctccacaaatatatctacaaggcgaaaatcgcaagtgtagcaatgttaatcatgtttcattggacaatgtcgtaagctagctaattgcgacaaatggctcgtcattgcgcttttcataacataaaatcattgaaactattctagttccaaattcgccaactgcgatgaaaagttccgtcgaagccaatccatgtatgttttccacttagaaagatcgcctgatgcctccgggccggggaacgccttgctcagctctcgggtaatctttagaattccgagggatgcctcctgggccttctccaactcttgcttgacggcgttgtcctttggcttgaaggaaagcacagtagtgtaatgctccgacaaagcgtctaggtgccgctcagtatcctccggtgcgatcttaatcagtttggaggtcatgagattgctgattgcacggatgtcctgctcgtcatcgagaccagcgaggatgcggtcaaatagttcggccgtatgggtacgggagaaggaggtgtcgagcgaggcataaagggtttcgtaggcactctgtaaataatgatgttagtggaatctagggtaaatagtaagagacactgacctttcgcaaatcgagcccatcatccactttgtgtttgaatggacccatttgcacctcgcgaatgagctctggcttgattttggtgtcaccaagaacagccggaagaagctcatctaggtgagggagcagaagatccatcttgttatggattgcagagttgagagtggtcaacgcaagccggtggttgcccaaatcactgtcgctgagcatgttggtcaaaaggggcaccatcaacggtcgcagcacatcattgtaagcatcgctcgaatcggcaagcgtgtaacggaatgccgaaatcaccacgccacgaacagccgggtcggcattggctaggtactcctatgggcatgaggttagtattagaaacgtagcgcgatgggcacgacttacttggaagtgggggatgtaagcaacggggttaaggagtgccaagcgaccgacacattcagccccaacagcgcggttgtcttcctgttcggagacgacaaggagggcgtgccacaatttgtgagcggatggtgcaagatccggacgtacgacctctggatgctgaagtaattcgcgtaccgaatggagaagcaaatagctttgagcatttgatttctccaacccattcaaaatgattgggagataagctttgacgctacctgcggccgcgttgccaagagcagtcgcggcagccaagcgcacgtgatctgactgagattcaaaatgaggaatgaagagacttggagtcaacgggcactcggggcccattcgcaggccgatttcgcctaggatagcaagggcaaggcattttcggctaacatcccgtgcagtcttgagttctgttgagaaatcttccattgtgactccaagattcggtccaccgtggaccagaagggtgccaacagctcttccgaccactgacgagtcccctgtaattcccacgtcacggagaagattctgcatcaaactagcacctgcaccttcgtcgccaatgactttgaccagcagaagcaacgctttgagaacagttccgatgagtggtttggtcacaatcgagcagatagcagagatcaaaccgctggtcaccattagttttgcattgccagggacaagtttggcaataatgatcaacgtgggtgtaagtgtgtggaaatcagctgcagcgagaagaggcaaagcagcattctccagtgctgtgattgtctcaggggtgaggtgagatctgatgttagaattcatggaaagactgcggagagtttccaagcacgcgcctctcaaggcacgatcggatttgcgcaagttcgaccctagctcaagggcgacattgttgacccaatcactagaaacatcctgtttgcggctagcgagaacgacaacatcatcaatcgcacggacagcggacaaacgagttgtctcattcttcactcggtcgaccaaaacagccagaccattagatctcctctcagatgaaaggaactctgcaccccgatcgcctgaagtgcgtgcgaggatgacaccaaacacatgaattgctcgttgccggacttcgagatcagcgcttgtgtcggtgattcgagagtggacaacatcataaagcttctgcaactgcaaagtaacatcggaaggattggcagatacgcggggcggcgtcattgcttttataatttgctccacagcccccaaagcctcgctgctgactttgtagttgcggtcgttgacagctccgatcactccaggcaccagggcaatcaggaatggcaatagcgcgtcggagagatgggtctcggcaatcactgaaatgagacccagcgtttcgatttggagggtacctgcactgacggcagccccggtatgagccgctgtgctccctgagagggatgaggtcttgagggcatccgcaataaggtcttcaatttgttggagatggtctgcaagaccaccatagcgaaccaacgaaaggcttttgaggagaatcatcacagcttgtttgagaggaaccgaagcctgcttccaagctttgacaaggttctgcacaattaaaggcacagagcgagctagatcagcctgagaaccagacttgggggacgatggcacagcaggagaatccattgcggacgaggttccagcactcggctcgaagtcaatcattgacgcatcactgtcttggcgtctacgcttgcgagaattcttcgagccaccaacggcctccaggaagtcgttggatgtgacgatcatggatccctcgccagtcttccgaacaagcgccgtcaatgtcgacaccacctcaagcttcacactctcttctctctctttgctaatttgggagattagagctggggcaatctgctgaaacaaggccgaggagtcggaagcgcgaccaagcccgtaggccgagatgacggtgtaaagaagcttggcagcacaccggcgtaccttccagctcatgtcgtcgatatcactgtagccgccttcttcttcaaagtcctcgaattcgtcgtcgtcttccaggtcaggctcttctgtggcatcatcgtcctcactgccatcatcttgggtgcctcccatctcctcatcgtcctccacttcagcgacgtttggatcatattttaaaaatcgaagagctgatcgagtagtgttggttaggtacggttgcatctttttgttgcaggagctgatcaacgcctcgagcgtgaccaaggcagtctcgcggagctcgtccgcctgaggatcatgttcatcgtctgaataggatgacattgtcgcgatgatgaaatcacagaatatgtagtttttttgtgaaaataggaaagcgaaattgcgtgggctttgcgacacacgcgctggagaggtgtgtggtgttggggtcaccgtcatgagcctagagttgcaggcaagctagctgccccgcgctagtcccgatatggcaacaaactcacgtgcacgacctctactgcaaaaagtcaagcagatcaagtgatggttgggcacgttgtttggaagctagaagagcttgaagaccaccttgctttcttgctttagcccttttcttgctgctctggttgtcacctgccttgggatctgttgaggccggtgttgaaccttgcacgtcaaccctcataggagttgaccctcgcgtggtgactgtagctgctctagacgaaggttttgagatatgatttctcgaattcctttgaggtagtactgtccgctggcagcagcgtagacacttgtagactgtagcacctgtagatgccgatccagaggctaaaggcttgctttttttcggcttgatctcagtaactttactccactggggctttctaatgctaccacacgccccacagtgatctctcttctgctgggcatttaatgacttagattcctcgtggagaagccgggtgtgcaccgctagcagatgagccgatgtcgacgaaccgagggggatagccgagacagcctgaatgagaaaggaaggatcaatgtgagacattgtgtggccttgcctattgaggaataaagattcgtattgagaaatcaaacaattgtcagctcaatagcaaagacaatagaggcaaacgaagaacaatggagacaaacagaagacaatagcccgatgtttgctattcagagatttgccgcgcgggagcttaaaagccccaagctccacccgccgcttcttcccatctacatctctctgctctctaccctttccatctgctatccttcttttcttgcttttcatctttcgttttctttcctgcagtcttcatcggctttctagcaagggcttgcattcgatttttccttttccgacagcctcattccggggattttcttatttttcgcgctatcaaaatcccacagctcagtcagatcatccacgatgccacctgtgcgaattgccgtggaaggctgtgtaagtgatattgcatgactgcagatcccccatatcatgtgacatatccacttcgcagctggttgctaatcattctgtatagggtcatggtagcctcaatgacatttatgagactgttgatcgccaagccaccgagaaaggttgggactctgttgaccttgttatcattggtggggatttccaggtgagttccttgtcatgtccgattccacactagctcaacgttaactggtcaaaccaggctctgcgtaatgccaatgatgcgacttgtctctcggttccagacaagttcaagcaaatcggcgattttcatgagtactacagtggtggccgtgttgctccctatctgacattgttcatcggtggcaaccatgaggcgagcaatcacctcgccgagctctattacggcggttgggtggcccccaacatctacttcatgggtgcagccaacatcatccgctttggacctctccgaatctcggggatgtctggcatctggaagggttacgactaccggaagacccactacgaacgattgccatacaacagagatgacgtttcttccgtctaccatatccgggagctggatgtccgcaagttgctgcaagtgcgcacccagatcgacatcggtctctcccatgattggccaaagggggtcgaaaagcttggggaccatgcaacactgtttcgcaagaagtcaggcttcaaagccgattctgattcaggaaagctcggaagcatcgcggcacgcgaagctctcaatcatctgcgccctgcctattggctttcagctcatctgcatgtgcgttacactgcaaaggtgtcccatgatccacctcgcgcaaattccatttctttgagtccccccagtcctcatcttgctgtggccgatacccatgctgtgggcgattcaaatgctgtgtccgatacaaatgctgtggccgatacaaatgccgttgacgatacaaatcatgccactgtgatcccacggagtaatgtcaacaccaacacccttgctggccaccaattgcttggtactgccactggagacgaacagtctcgcatcaaagcctggaacgaattcggagttaacgctcgacgagctgagaaggagaagcgagaccaagacgattttatgcgtatgatcagagcgagaaagccgaaacctccccgaaacattacgtttgaagaaacggtcaagattgggcgcggtcccgttcagacgttcgtacgtggcgccgatggagaaaaaatcgaacccgccccagccgacgatgagagcatcgaaaacctcgacaaagttagccagggaaacagccctgtgaatatttcttccgaggaggccgttgccaagcagggatcttcgctgcttgctgagaccactgaagatgtccagacagccaagcatgtcaagacaatgcaggatgtcaagactactgacgtcgctgacaatattgataagatcagcatctctaccagtcccagcagcaccgcgagcgttaaatcttctccagctcagaaggctcttccaaaagccgatatctctctcaattggggtggtgatccctctcctgattcctggtggaatgatgatgagggtgatcgcgttcctgaagtggaagccgaactcccgagcagccttgcgcagtcgtttgtacccaaagctgccacaaataattcaacttccgaacgccttccacctcccgagatgatcaaaaatcttgagactcagttcctgaccttggataagccacacaatcatgatgcctttgtcgaactgttggagattgagccaatttccgaggaggatgatgccccagtggagtctcccctacgactcaagtacgacaaggagtggctggccattactcgtgcatttgccgatgagctcgagtttggtggacaccccaagggcaaggtccctgcccacaagggatttgaatactaccaacagcgtatcgccgaggaggagaaatgggtacaggagaacgttgtcaacgctgggttgttgaacgttcccactgacttcgtcctgactgcccccgtctatgaccccaatgtttcgatcaatacccaagagcagccgaaggagtacaccaacccacagacctctgccttctgcaatctgattgggatcgaaaacaagtttgacatggccgaggaagagcgtcaggctcgcatggcggccggcccacgccccgaagaacctcgtcagtacactggtcgtggtggacgaggtggtcgtggcggccgtggcggtcgtggtcgtggtcgcggcggccgtggttctggacgcggtggttatggtggtcgtggtgggcgtggcagcactgatgcctggtaatttgatcggtgctttcgcgtttctgttggcggcttgacgatttcgaacgggggaagtaggaatttttgaagttagaatatctttaccaatttcttttgttttactctccccatgtatgtatgtctacgaaattatgaaaccatacagtgatcacctagtttcgacttggatttctgcatatttgtgacacgccagaatttctcggttagcctgtgctctactggcatgtgctatgtatcctagggcaaagtttcccgccactctctccatccgttcagtgttaagccataaatctgtcttcttttcacttggaagtgtctagatgtatatttatcaaatgcatatatgcttttcgttgcatttgacctttcccaagagtcttcgttcttcgtgtttccgcctccgctgtgttaaaatctttttttgttcgaggcttttattcaaagatgaagatagatgaagaagctgatcaagtccgccaacaacctaatactctcattgaaatggtaatcaacaaccacttcagcttccaccaattggttgtgaccttgtaagattaaaaaaaaaagatgtgcatcatccgtgaatcgaacacgggcctcgtcgatggcaacgacgaattctaccactagaccaatgatgctgaggcaccagacgattctgagagctgattcgttgatgatatctggtggtccctgttatcgtctttgaggcatctctgaagttctagatctttgaaatccaactggtcatttttccaaagatacctactattatttgatatttgatggattggaataatgatttgcgagaaatggtaattattcgtcacatggtatcggagcagttggcttcattcaatctcctcgatgcgtggatgtccggtgctttcccattccatgggatcaacctgtagaccggcgatcctgtcacccagcccaaattgtggattgaagccatcttgaccatcctggatctgagcgccaatgccccacatcaaggacttctccgaccaagcttccaagctttcaatcaaggcgcgcagatttccacgagcgagcccgtcctcctcacgaccctcgacgaagcggagagttcgtagcatggcagggatgttaccaatggttgactgtccctgcatacttgaaccacgtggagccgaaaaactggaagccgagtcgtcaaaaagagaaaagccaaacccgatgtcccggtttccgcgtctctcccgcgctgcctcgagagctttgagaatgtcgaagagtagaatggtactcgcccggcgcaggatagcactctctggttcagtctcgagagttagggtagcaagcgcgagttcgacggcggaagaaagaatgactgggccaagaccgaggatattgacgttgatggctgatccaagaatggaaatggccgatgcccggatgcgaaggtcatcaggagcatcatctgcggatgcaccggcagcccatgcagcaaccacgtttgtagcgtacgccgattgctctggggattcgtcgtctaaatgaagttctgagaggtcaagctcggaagcagcgttggctactcctgatgaaatggaccagccttccggcatagctggctcttttgccttgcgctgtgcgcgttcttgttcctgtctctctttggcgagtttttccttgcggatttgctgtgcatgttgcttgttgccacgccgtcctgcaacggcaatgataccctctccaagaattttggccgtatcaccgaccagtgcgtctcctaattcctggactgttcgcagcagacactcaccaatcctgagtctttcgtccaaggctcgttgctcgcgtctatctgcgtactcttcaaccaaggttttgatcacggtacgtgggtgacgtgatgctagtgtaccaactatcttaattgcaccgaggtatgcgtattcctcgttggcagcggttttagatgtgtcggtgatgagggagagaaggagtgtgagggtcgagcccacatcaataacaggtgatgagttcatgatcagtttcgaaatcagcgataggccctccgcctgcacgggtggtaggtctgagttgagattggcaagcgcctgacgatgcgtgtcaaggtcctgaacatgagctggtactgccttgattgtggtttcatcggtagcggcaaggtgaatctccaacaacatagacgaggtcgttgctgctttggagaggatagtgggcagaaacggaataagttgatcgaggtcctttttcaaagctccaaggaggggttggatttcggcagtgggagagaactcggcggatgcaagaagtgtggacatcaaactaaaggctgtcgaaacggactcaaaggagtcgttgcttaactcatccctgtcgttgtccttggtttccacaatattagccagagatgacagggataccttgctatttacgcctcgcatcgctgtttcttgggcgctaaatctatgtagctccccatcaataacctgcttgatgagctctaaaactcggagcgggcgtcgagtgagtgcttctttgaagttctcaagcagcttctctgcaaccttggcactgacaagcctctgtatgatgttgtcactctcatcaacgggacctccgtttagtgtcttgcgagggggtgcggaaccttggggatgcaccagccagttttgactgacatagaggaatatatcccccgtccgttcctcactgctaggatccgagccgatgagactgacgaaaatatctgctcgtccttggagggaatcgatcaatcgcaccagatttgaatgctcattcgttttctcactccgcttcttcaatgcgaccccagcgtcggaatctttcacgtatgtccacgtcgagcctccatcccaaagcagattatcaaccagctttttgaggggttgggcaccaacagagataccaaaatatgtttgtagcagaggcaatacccttccatggaatgaggtcagctcttcctcctgagagaaacaaactaagccccatagtggaagaataatcggatagacgattcgtttcacgagaccggggtttggatgctgcaatgtcagacacctcagtctgcttatagccaggtccactgtggcgccatccaccaagacattggatgcgggatttggtgccacggaatttggaaaagagccttcaatatcggtaaaacgggtgatccatcgccttgatttagcgtcaagattcgcggtaagtgcattgaatataggctctataaagatggagtggccgacagtaccaggagcaccataagcccgtttccccaaaattccattaccgacaacgtaggatgcagtttgcctcagatccggatcatcgccgtctatcaatgctagcagttggggagcaattgtctcaaaatagacagttgggtcaacatcagatggcacagaagaaaggagtcgtgagatttgcatgatcgcctgcacagtcaaacgagggccatgtgactggtcctgtgcttcctggcctagcgatggggaaaactgcgacgcaatgaacatgatggtttgcactactccaccgggtcgtagcggaacttgcgcgatctggctggagatagtggacttgaaccatggtgcagtatctgactggaggaacgcggacagcgtaggtagcaacacagtggttggggtactgtaggctgttagtattacttagaaatagtaaaagcaaggggaacgtactcatcaattattttggccaacgttttctgatacttagtccggtcgaatgatgccgtggtatttggattgaaagccagatcggccgtgccactgattatatcactcaatatacgaccacgaatgatcggctggaggcttggtcttgggtcgaaaagaacgtcaaccaaaacgtcgattatgcggcgcaaaagaggctcatcgtgcggtacactactagcagatgcttgagcctgcttcgcaatgacaccagctggtaataccgatatcacacgctgctgcagggggatcccaacgccagatgatagcgaaggatatattccttccagagaaaccaggtccagtaatgcatgtagcatccgacgacgcttggcatcttctgctggtgagtcttcaacctccccgcaggatttgagtgacccaaattggtcctcaggtgatacaaatgatttatggatactggtcaaaatatccaaagccctattgatcaccgctggtctcgcggcatcatcaccctccgaatcccgactgaggatctgcaacaaggatttgccttgggtcttctttatttcctcttgaagatatagttagcgctcgacctagatgtagcttgacatctcaaaggtccatacctcgatcgagaactgggttcagaaagttcttagcaatgccaaacgcgtcgcgaagttgctgttcatctcccatcataaataattgtaggatactatcatgctgaattcacgccaatgaaggtattttcctcatcgacattgtccggttccaaggttcgaaaagtaaatgaaatcaccacgaacaattgcggtcttggcgtttgtggctgattatgtcatagcagataaacccgtgactgtggtaatcacgtgatagtcgcgtcagtggcccgcgcttgcccgcattggtattgtcgcgtcaactgagatacgttgttgttgtcaccaactccgtctacttctatccactgctcatttcacaatttcaattgacaatgttagaccgatgtggacagttctccagctaccccggatcttgcttgttcccacgacattcattggaccccattctcgttcaaacctgccacagttccaccgcgaccgtttcctgagtgtggagccactcgagtctcttgccttacaaggcacacatatacagatcaaccctctcagatcttcattttcctctgctgccttaaatggtgaaccgtcacgtatatctcgccttcggtgactcatattgtttcggtgcaaaagatattgaagtcaaccccaagcctctctcggttcaatgtccacagcgacacagtttcacggattgcgcatgccggataatacgattagccgaaacagactgtgatggtccgattaagcgaaagatattcgaatcagccagagccttagggcacaaaagacggtttactatgcgttatccaaatggagagcgcgtcggtttaccaatgctggacgctgcatgccggtcacaaacggatggtcgccctatgcctcggatgtcagttcaacgagaagagaacgtgggtgaagcatgtcgggtacttcggtatcagatgttaccttgaggagcaaccacgacagcgcgaccagatggcgattgaatacgacattcaagtctcgaatatcctagggcgtcaaattgtttggctcagatatttgttgcctagaacacagcagtatccttacacacagtcatagtgtcagcatatccaaagaatccactcgccggaatcaacattcctctccctgaaaattgcccaggcattttcacagttgaagttgtcgcgaggtcctttggttatgctgccctatgattcttcaatgttggccctaggagcacatagaagattgcgaactgttgtctcgttccagatggcaataaatttccccaaacaatttggtgtttttcggacttgtttgtctgtactctatcgtcaattctgcgatcatcagctgtctgctcctgcacatgtttcctattccaggatccctgggggtcttgcccctgcgttccaccttcttgggttctgttactcctacgccccacaggcggctaggcacctcgtatcacggcacccgccactgattcgacttcgtcagaagatctcgaccgaccgtgttagccatctcttcgcaaagtagtttgtggatagatcgatgggcgccgatctcaacaatgacttccaccattgttccttccctagggaagaaggaagcgatttttctggatgttctttgtccgcttcacaatatgccctcccgcgacaccctcgcgtctaccgggagaggaaacaaaaacctgtcccagagggtactgtaccacacacgggagactcggcttcatgctcttgcgacggtatcggtgaaacaatggcgatttgactaaacgtgcggagatgggtggccgtcaagcagatttggttgagtttactgtgtctcatccaagtttggcttgtctttgtgaaatttgtgtgagctctggtgagtttgagggatatgttcatcggtgtcgtctgctcccagacattcctcagctcccatttgcgccaatctttgatgctcgccttgatatctctcgattgatgacaatttttctggtcggagcaacgtacggtttctatcgttcgaacgctttaactcatcagcccatttacagtcggcatgggggatgtccttggtcggggttctaacctgtatgcgtcatgcagtaggtgtcgtgggacctctctcgagtgaggatcaaagctttggcttgtctacgatgcttatctgctgccatgcgtcccgactaaggctcgtctctaatgtctggttgtaatgaactgaaaagcgacgaattggaaatcgggggatctctataccgcgaatgaactattgtttggtcattgggacttgggcgttgtgtcaatgatggttttttctttccatgggagcagaatgtttggccaggcgatagccggtggactgccgtttctactatcctttggtggtagaagcggccactttttttttataagtacccccaaatcctctaattccaaggtgatgctaactacttatatttgcagattctggtgcttggtggatatgacaggaaattaaacaataagaatgttagctaacacaatggacaatgcacgttgtacacctgcccatggatccatgtagatatcaatgacgtcactacatcatgccatcctcaccgcccttcaaatagaaggcggtgacatatgtcatggcagaaatgtaatacatcatcccactctttgtcagccccacctgccccgcgcagaataggaaggaatgttcccgtggctccgatatttttttggcgataagaatttcttgcttggatccaacttgctttactataacttccctcgcatttccctctttacacagatattttctatcccactacacattatttctcatttctctttacacaaatcatatacaatggtcaccgtctccaaagccgacaatgatgcccttgaggcacagttcgagtcgcaattccaaaagcccggcgatcttgtggagcgtgatgatgacaccggtgcgatgtcaattgaatcactctgcatgaactgccacgagcaagggttcgtttctgatattcgattatgttttgcacattgctaaccttccactttaattagagtcacgcgcttgctcttgcttcgagtcccttacttcagagacattatcctggagagtttcgaatgtgaacattgccactttaaaaacaactcgatcaaatccgccggccagattcaggagcgtggaacagtctacactttgagggtcgagaatgaggaggatcttcaggtatctatctccagctataattcgttttctcctgctcaagctaattggatatttagcgccaagtcatccggagtgatgtttcaggattcaaacttaccactaaggaaggcaaagagattgaagttcccaagggaacaggccagctgaccaatgtggaaggcagtatgtgaagcccaatgcaatatagttcgatcccaagacgctaaccgtatctagtggttcaactcattcatgaaaatttgtcaggagagcaagatctccgtaaggagcaagctcctgaactttacaatgcccttgtgcctgttatcgccagtcttgagaagatcatgaaacgcgaggacgctttccccttcatcatcacgctagatgacctcactggaaattcgtggattgcacctaacgccaatgatcgtggcaacaagtacaagcgccatgaatacccgcgtacccacgaacagaacgaggagttgggaatctccgctgacgaaaacgctgtcaacaaagaagacacagctgaagtgggcgccggcgacccagatgatctcgatatcgttgatggccaggtctacagcatccctgccgagtgccccggctgtaataagcaagccgaggtgaacattaagaaagtcaacattccttacttcaaggaagtcctgctgttcggcacgaactgtgatcactgcggctacaaatcttccgcaattaagaccggtggcgaggtacccgagaagggcagacgtatcactctcgaagtgaagaacgaggttgatctctcgcgcgacattctcaagagtgacagcgcaggactttacagtcccgaactcgacctagacgttcagccaggaacgctcggtggacgtttcaccaccgttgaaggattactaggttcgttccccttatttgattatattgacccagctaaccctttatatagttgagatccgggatcagttaaagggtgccattttcgatgttgacgattccgcacactccggaggtgacagcatggtctcttccgataaggataaatggcaaagattcttcagtcgtctcgaccaggctatcaacggcgagctcaaattcactattactttgcaagacccgatggcctcgtcttacgtccaagacctttgcagtccagctgccgaccctcagatcaccattgaggactacacccgctctgccgaagaggaagatgatctaggtctgacacacatgaagaccgagggttatgaggaggctgaggccgaagccgccaaggctaaggccgatgccgccaaggccgatgccaccacgaccgatgctactcagaaagagtagtcgaaggattacgatgtaatatccatttcatgaaactcgcgatgatctgattcttttgggattcttgcataacggcgtctgtgatatgtacttttttgctggggtaattagatatttggtcatacatagggatgaagtcataaaagttattttactgtctacttacttcatcatgcatttcttcccagtaaaactgttaataggagaggcctaccgagagagggggtcactttgaagtgtggattgaattgttgaagctaaactagagctgacatggtagaatctctctgtatctactgatcatatctaattttgcaattcattctctaaacggtgtacaatgcactaacacgaaacacatttctcgaatcttctcgcaagcaccaggcacttcatatccacgaagcgattccaaagttcagatgccaccaccataacagcacctaaaacgatcatggttcccatccaagtcatagcaaacgatagagcatgcttgctcgcctcgatagtaccaggataaggcgttcttgtaactgcccaccacaaaaagtctcgcaccggccatttaagagcgagatagactgtcgggtggactagatagagcggaaatgagatcttgcccaagtattgcagtggccgggagttaagtggcctttgaagcagcgcagatttgctaattgcatatatcaccagaacagctcccacgctcctccagcaccggggcatcatctcagcattatcccactcgggagatcgagccacggccagccatcggtattcagctgctaaccggtcagcaccgcacatgcaaaggaaatacatccctagaatgaaagagactgatattccaatccgttggagatagattttctctgtgaatttgttccaggctttggtaatgggctcttgaatctcgagaggtgaagatgaatacgataatgcaatctctctgtctggtccggactctgacgcgacgtgtctctccgcaagaagaatcccagcaacgaaagcgaagaggtcccaatgtcccatataaaaccaatacatcgccacgcctaccaatgccagataccgaggctggggcttccaaaacgagaacgtcaagatcaacaagtagacagcacacgagccacgaaactcaattggcatcgtccacagctggtagtttatagtcctcatatccggtcgattgcgatcaaaattgatatcgacttgatggttgctgatatccagcagatgcactattctcgaaagcacatattggacgtgagcccaaggcgccgtcaagggctttagcccgcctagccagtcatccgcagctttccacgggaacacattgcagaagtacacaagttcgcttagaaatagtatggcgatagacggcagataaattcgaaagattcggcgagttgcagcagagcataatcgacgaaagaatccgacattactcgccccaacgtcctcgcgacatcgcagaagcggaagagagatcgcgtagcccgatataaccatgaacagggctaccattgacgggccattgaagagaagtcggaagggcggaagttggattagacgatggttttcttcggccggttcgtcccagtaggacctggtcaaaaagccgacgatactcttaggctccgagctctttgaatggtgtattactaccagagctgaggctattccccggaggctatcaagccaaagaatgcgccccatgctaggaaagtaatttgtacagaaaggagagaaagtcaacgagggctgatgctttgttgaatagtataataacttcggtaacttgtatagaattagattacagaaaggtacttttgtctggaacttgacctataaacttagtcttcaagctagtaacactagtaaaaaaaaaactcgagatcgatacagctgatcgcgtctgtaatacaggtggcaatgaaaccctgcaagacgacgatgcacgatataaatagggttcatcctcgtccctaagaggttatatatacggggtacatgcaggagccatcacaatatgataggtaaactgtgagatcccaaaaacaaaaagcaattggtcgatgaccccaaaaatgatattatcgtgtgaccccctgcagatccctagacttacgcctaactatgaattcattggtcgcattggacacaagtattccgtccgattttcaattttcaattttctacaaagtagatcgtgatcgttactcggatctgttcggctttagaatcactgggcgaatttcacgttcagatggttccaattcgttaaatattaggattaagccaactttttcctagcagtacccaatataactttttccttgaacaagaaatctgcagagttgactttctccacaagtaaggcagctctatatgcatagtgcccaaatctatatcttgcctgacaaggcattcaagcccacagattcggtctgtgcacgaatctgcttctgccacatagctttatatcgaccattagcagccagaagttgctcatgggtcccagtctctgcaacccgaccttcgtgcaatacaacaatgttatcagcagtggtgatggtgctcagccgatgggcaattactagcactgtgcgcccacgtgacaggatggctagtgcttcttgaatgttctgctccgtctcggaatctaatgcggccgttgcctcatcaagcaggatgatctgaggtttcttgataatggttcgggcaatggcgacgcgctgtttctcaccaccacttagtcgtaatccacgatctcccactttggtttcgtaaccgtcggggaacgccatgatcttgtcgtgtacactggctgcacggcaggcctcgtagacttcctcgtcggtggcgttttggttggcatatttgaggttgtacatgattgtttcgttgaagagaacggtgtcttgtgggacgacgccaatgtgtctgcgtaccgaatcaattgtcaaggtctgcgtatcgtatccgtcaataagaagatttccgctgctcggattgtagaacctatagagcaagcggaagattgtcgatttcccgccacctgattctcctaccagagctgtagttgtacccggtttacagtcaaaggtcaatccgttgagagcaggtcgtcgggtgtcatacgagaatttgatctcgttaaatgtgattcggccgtgacagactgctagcggtgttgcagacggtgcatccactaccgatggctggacgcggaaaagctcgagtagacgctctgcgttgatcaacgctgattgaatgtaccggtagaaggttccgaagatgttcaatggggcttgcagttgggccatgtaggtaaggagcgtcacgaattggccgactggacgttgaccacgagcaacttggtaggcacaaataaaacaggtgatgagaaggccaaacatgaaaatgacattctggcaaatattcatcagattctgtgcgaatagggaatgccattccgcacggaggtagtctgagaccgctcctcgatagcgattgaactcgtattcctctgcgttgaagtatttgacagtttcgtaggacacaagggaatcattcctgtgtaggttagtaaagcgtaatgagataaacagagacgtaatacaaacttacttgacagcgtcttcctgtctggaagcgttcaccatttgacgtcgcatattggccctccaagaggcaatcttgatggttgaatagaggtagaagaatgtcatgacagcaacagccaacgcgtagtacacgtcaaatacgattagaaaataaccaatggcgatggtcaaatcaatgaacatcggcaacacttgaaatgtcacttgctcaagaaaagtgttgattgagttgcctttggtgagggcagagagaacctcgcccatctttttacccaggtgaaagtccagtcctaggttatgaacatgctcaaatgaagcggttgacaactccatgtatgcatactggctcactgagatccacagattcgagcgaaccgactcaaggaaaccttgactaccttgaagccaacggtagatgatatacagacagatgggcatccaaggcactttcagatttccatcgctggtggacaatgagtctgcgatcactcccacttgatatgggactaggatatttaccgctcgctgcacaatcaatatagcaaagcacatgacgacgacaatttgcaaccggagagacttgtaaggccacagatatggaaagaatagggaatagccactcagatattccatccagttggtggaaggggtcgtcaaaggccgcacccatgcttctacttccggggtctgttgaccatcggtcaaggcatcaccatcatccgagttggcattgcctcttgaatctagcaggctagtcgtctctccggcatcggcatcctcagcctccttgaatgcgcaatgtttgcgggcagatttgaaaatgtaggacgcgaccagcagtgtgagaacaaaaatccgcactgaacctgcggaaatctccaatgcctcccaaaatgtgatctttgtacgcaatcttccaccgaatggatcttcgattgtaggttcatggtggatgtgggaatagattgagattgaagttgagagaatggctatctcgaagggaatggccgagagccatgggacgaattgcgcgattgacggtccacggttctcgagtaaagagatgaagataacggtatgagtgaagaaagccccgacgacaaagaactaggtttaattagctttgctttcaattttggaaacaggtatcgcaccactaccgcttgaccacaccaccactgctctgactttgaaactatggcatgggtcatatgaattgctgcctcagcaatataggttgccagcacaaacagatccagccaaacaaaccagcccttggatctattccgcgcaagctccgcgggcaagtccctggccaccgccatcatcattcgggttcgcctaggcagtggtttcccattggggccatactggactttaatgttgcgatcagcatttctggctacctgagaggaatggaccaaaaagacgataaagataaaccctagcaaaatcggagggtatccaaagcgaagatattgaagcaattcttgggcaacgatagccgaatccatggctgcaggcttataatcaaagactctctcaaagtggctttgaccgggcaagacgggaagagtgggaattgcccgggaaagtatgtgattgtcttcacatgcgaggagttggctgcgagatcgcaagctgaaagttcacaattgagctgtcgtgcgctcacattttagttgcgacggtgctgtcaatcagtggagctcggagggacactagtaacgccactgtattggctagtaatctttgcttccaagattgtgttacccatcgatgcatgtctgacctgaagatcggggtcagtgacttgtgtatactccagacagacgctattatctagtatatagacaagtatagagtacagggtatgtacttgacctcgtaccgaatatgtatgtactggatttccgcccttctggaccttctccttcctttttggtcgttgtctcttaccgctcttttatcaagggctgagcaggatgcttacataattcacatacttcgccgttcaaggttcgctcaccgacaccagcatcacctgactatcacctgaccacttgcctatttaagtgccctgattcgcccattgagcaggagctgagcggctgggtgctgcgtacgtcaatctccctgggacgatccgggtaggccgctgaaggtcaagttaaggtggctggacctcatactcagcctcccatcgccgataccatgagagctttggtggccatccagctaggtttgctccctatgttgcccgttggaatgcagactgtatatatgcattgcatagggatattgaaattgttcatttaatttctcggctaatatatctcatcattacttgttcatggtaaactatacagtaatatatccaccatcaactaccatagcatgaccctgtacaaaagaggcctgcgtggagcataagaaaaggattgcatcggcgacctctgctggctgacccattctcttcataggggctatctccgctgctggagtgatggccgcgcgaatctcgggattctccatgatgagtggtgtttcaatgacacctggacaaacacagttgactcgaatcccatccttggaataatcgataccatctgcccgagtcattccaatgaccgcggattttgatgcacaatacgcagctagaacactgtcaatcgtgggtttaaatggacagcagcgcagaacttacgagcacctggacggctaacgattcccaactgactagcaacgttcacaactgcgccccgctggccaggacggttagggtcgtgacttgggagttcactttgagacaccatctgtctaagctctgctcgagaagacagccagcagcctcggtagttgatattgttgacccggtcaaattcttcgaggctcgtttccgctgagcgcaatgacttcccaaggacacctgcacagttgacagcatagtcgactcgtccgaattgttgtacgactgcgtcaataaacgagtctgcgaactggtcatctgccacattcccagctttcactaggagttgagtcttggggtatgtagaagcaatggcttttgcggttgtctgcaaagacttttcgcttagatctgtgatagcaattctctcacatcctgctgcggcaaaggctttggctgttgcagcgccgattcctagatcatgttggtgatatatccacaacggtcggctatgctacgtacctgttccaccagcaccagtaatgactgccacgccaggaaacatattgtatgccatgactgatcaaagttaattatcaaatcattaaactggcaagtcaatccagtcaagaagtcgaagtatagcatcgaaactaccccaactcggaatcccacctttatcgcttatcacgggccgaactgttccgaaagtaccccgagttggagtagttggagtcaattctcctatctcgacatcgttaactatatgaatgtactagttatgtacatactatgtactatgtaacatgtagttaactacagagtatattgatccatctgataatatccatcttgaatagtattgttagtatgtccgttgaaattctccattttgtattttagttggagagcatgcatgtgttgtgctgtgttatatcctactataacttacatgtagttatgtttttcaacaacttgtacctcatcttatcgcataatctatctccaattttgccagacttaccccaaacccatatccacatgccaacctcacccctatgatattcaatccctcgtggtttcgtggggaaagtggaccagacccattccgtcttatcgcgcgttagtgtgcaatagctgtgaccaaagtactgtgaacgtccggataaattccagggtgccaagccatacataagcctgaggaaaaacagagataagtgccctcctcagcacttgtctatatataccgaccgtgggtcccccagttcagagctccctgttcactgcctatatttacatctgattggaaaccttctcatcctcgttcaacatggcaattcatacagatgagatcaaggaaacctctccctacccagacgaccccaaagccgtcgagacacaagaaggcgaagtcgacgacaaattcgaagtcttcaaacggggcgagggccaagtcgattttcgaactgtcagttggattcgggcttcaattatctttctgaagagtcagtttagtccggtctcactattgcttctgtgaaaactgacaccgtaatagtcatcttcgcaaccggcgtcctctccatcccatcattgatgtatgagctaggggcattccctggcgccgtttccgtgatagcttggactgtactcaatgcctattgcgctattgtgcagggtaacttccgcaatgcctacccgggctgccattccatcgtggacatggcccaggtggtcggtggaccgatcgtgagggagcttgttggcttcttgttcacggttagttatattattgtcgcggcatcgggtgtcattggcgtatcgaccgcattcaatgccctgtcacggcattccatctgtaccgtttggttctcgttcatcgcgatgattatcattaccatgtgtgctagtgtgcgcaaattctcgcatattggctggctcacctgggttggatttggcagtgtctatgttgccgtttttatcattgtgtaagctttggccacttttcgtctctcggaccaagtactaatggctctagtatcggcgtaacaacacgagaccgaccagcagcagcgccccaaacaggtgacttcgacctcggctaccgagtcatcggtgaccccaacttcacaaccggcatcacagcctcggcaacgatcttcgtctccagtgcagccacatccgccttcctcccggtcatttcggagatgcgcaggccaaaggattaccccaaagcagtctacctaagcatgagcctggtgacagcctcttacctgactttcagcctggtaatctacgcctggtgcggcaagtggatcgcctccccatcacttggtagcgccggcgaaaccgtcaagcgggtcgcctacggcatcgccctcccgggcctgattgtcagcggctgtctctacgtacacgtcgcagccaagtacctcttcgtgcgaatcctgcgcaactcgcgtcatctgcaagcgaacacggccgtgcattggtgcacttggctgtcgtgtacgattggtatgtcggctatttcgtttgttttggcgtgcgctatccccatcttcaactatgtgttggcattggtgggcagtttgtgcttcgcgcctttggcgattagtctgcccgggtggttatggttgtatagtcatcgcgattattggaaggggaatgcgctgagggtcatgttgtatgctttccatgtctttctcgtgctgttagggctgtttttggccgttggaggcacttatggggttgtggtgcagattaaggaggcttacgctgatggacagattgaatctgccttttcttgcgctgataatagttgagaagtgccgaggtctgcggagtacgatgtatacaacatacctcgtcaggtcaggtcatgtcgggtggtgtggctaccatcctcacctgttgttatttagactgttttctatatgagtaattgccattgagactatgatcaacgaataaactacaagttcacctttgatttcctcttggcacttctgccgagtgccgtttccgcaaacgaacccgaatccgccaaataagctgcctttcctctttcgtggacatcttgttatttagctcaatattatcaagatagtttctaccgtataatattggaatgtgtacaatgtagatcttgaattgaacgggcatgctatgtattcgccattatcatttattcgtaacaatttgaccttgtattaccgcactctgtgggattactgcagttggattgcaaagtgacctggttttaattacagtttattgatcctccgctgctttttactttttgctttttgctatgttgtatatggagtactccgtaaaacttcttattcggcatagtcaatgattatacgatgaatagctcgcgtgatacatttaatgttgcccaataagccgtacggagtagggagtgacgatttagaatatttacatagcttacatcgaaataccccttctattgatataaatcatagcttagcacatgcgacccagcacaaataggttgttatagaggtcattgctttggcttggatcatctttcagtgatggccaaagttcgtaaaaaccaatagatacgtaatattcggattttgtgtattttataactttaaggttcaggtaaagcgcgggaagagccatggttctactccatagtgggtcgaccttcttagctctaaccgatgccgatttgctctcgaagctcagctccacagacaattcttcagcttcaatacaatagtgacttatgtggagaataatacatcgtgttaccaggccacaacaaaaaccatggtccctatttatggcttagagcgggctgtatctgctctgtttctgggatagactgactgctattgatcaatatcaggttggcactagagtagacacaatggctttcctagggcaaggctgcctacatgcatgtcaaaatgtcctctggtggctagctgaattcaatactggagctgtattcatcagaagctaggaattgcgtacttgatgacctagcgtttggtatccatcgttacaaattcatcatccgggctttcaataatgtcatacccaggtacctgatgtgtgatctgcagctccttaggcctatcatgtcttcagccactcagccattaactgagacaaatttggcctgcggactacgaagacggacttactcgcttgaacatatataattggccacaaaaaggttgtgtatgctgtagcttagtatccaatagaacgctaattatgcgatgctccccaacatgatccagacagcgtatccattctgtcacagatcgacctgacctacggagtatgtagtcacaccgagatccaccgtatgttgcataaggtggcacagctgaagatcttcgtattatgtcgatcgttgtctgatcggtgtattttgagctagagtcaaagagagagcccttcttgagattacagtcgaatgaaagtgaatgatatattgttatcctatttcttttttatgctctgtccttctattgaaattctctaccccatagaatggccaccttagagcgagctagattcgaggaagatgttttgccaaccaccctcgacaagctcatcattccaaaagcagaggacggcaacttcgcattgactgcattacccgaggccgactccatcaccgaaatcgttgaatctgtcctcggccactctgttgagctgcaccgtcttcaagcatccggagcagaaggtcaatctggctgctccatctacttcgtccggaacagttcccatccggaaagaaccgtcgccgtcacaaaggtatatccaccggcatgtcataaagacttctttgaagaactcgttgcatatcggaggttgatatctctttccgatccaccgtctgctgctcggcctctcggggtgggaagaacgcgcgatgagaacaccgcagagcctatcggagtgattgtctaccagctcgcagcaggtaaggcaatcaacacaattatccgtgacattggtcgagtctccactctccgacgtatcgcaaagcagccttgtcccgaagaaacaagggaaataatgaatgatattgttcgcggtgcgctccatgggatctcaattagtcataaaacacagcaaatccaatcatccaatattccaactgctgagatgttggactgtcaattcaatggactgatggccgacttgatttctgccgtccaaggagtggcattaacaatggccaagctgcaccgggaaaagagcgaatggagcagtgccagcgaatctgtcgtcgagagactccgcaacaagttacaaggttgggtccaagagattcagggcccatcgcgaaagcagtatgaacgcgctattggatctcataaaatacagcaattggcctcattggttgaccgagcgattaaatattcacgggaagaaggtgtagcgtcactactgcatgccgatgcctcgccgggaaatttcttctgggaccccgttcaaggaattaccatgatcgactacgggggactgacccgctcgatagatgcgagcggccgacctattggaccggcggaaatggatgcggctgggtttcacgagcgactgcgaaagtatgccggggatttcggaatgagtgaagctgatattggccaggttcagagggagttctggaaagcataccaggcgcagggtataccgatcaatgaagggcttgcacggttgttcaaaacacgcacacaactatctcgactatggtctgctgtggaaaagcaagatacatcacgcgatgaacataaagctctccagttcagcgaaaaagttgaattcgaatgggaacgtcttgtcaatatctcgcccgaaaagatccaaccttggagagtgctcgtccttgccaatgccagtgggccaggtaaaggaggtctgcctctgttgaatcaagaactagtcaaggccatgtcagaaatccccaatgcatcagttactctattcatggtagagcctgagaatgaagtcaaaaacacattggcatggtcagggcatggtcgggctaaagtagtctgcattccctctaggggagccgaccccggtgccttgctctaccatgtggcgaaggttcaacagccaggagattatggtctgcccattccagatgaccagcatccatgcccattcaatctcatcattggccactcgcgatactctagcaccgcagcttccttgatacgtgagagatggtatcccacagccaaactcgcgctcatcacacatacaagtgctctgcgcaagtcagacatagcatggaagtggtacggacaaacacgcgagcaaggctatgttgaagccgctcggctagcaatgctggacgagaggattcttccaaaagcagatttggccgttggagtcgggcctgtactcacaactgaagcacgagaacgcgagtggatgggccaatgcaatcggccacgatccaacatgacgggacctcgctttcatgaactaattccaggtgtgcgcacgggtgatgcttgcacgcaacagcgacagcccaacgacctgtttcgggtcctcctcgctggtcgagcagatgatcccgccaaaggcttggacgacgccgtgtacgctgtgcgcaagatcgcactctctggaaacgagatctccctggacgtactggggctcccagtagaagacgtggagcgctggcagcaagccgtcgatgagatgacgggcatgccagacctcgtcagattgcaccctttctccgatgaccccgatgcggtctcgcggttctactgtaacgcggatttggtcataatgccctcgatgcacgaaggcttcggaatgattttcaccgaagtggccggactgggcgttcccatcttagtgacgcaggaaagtggcgcaggtcagtttgcgcttgatcgcactcgcattccgccgggacttggccaagcctgtgtggtgatggacgagagcacatatggaattgtcccttcaccgacaagccagcgcgtagccgtctgggcttatcggatcgaccaggtgagatgttacccggagcaaacgagacggcatgctcgttctctacagcgaatcatgcgaggttattcgtggaaacacgccgctaaggctctgcttcgctccacgatggagggtgagggagatacagtgcagatggcgcatggcagcattgcaccggcttattcatcatggtctcgtccatcgcttgggatgagcgtggtatcgtcaatgcggcgagctgcacgaacgcgaaatcgaagcggaaagccgactttgaagcaggcagacgaagtaatgcaaaatcttccagagatagccccgactatttcagcgctagcagagcatgtctctgctgctgttgggtgtcctgtcaacttgcggagtctcgatcccactcatcccgggggcttttctggtgctatcattttctttgcttttgccaacgatgaatttaccaatggagagacaacgttgtcatctaatgaccgatgcaaagaccgtgcggttgctgtggttaaactgttcgtccacggcttggataatggcatcacggaggagttgtcaagcttagaatggcttcttttgcatacaaagggggacatcaagactgccgccccgttagccgttgggcagatgacgtgggatacgaaaccagctggtgtggtcacatatcaagttgcccccggggtatccctttatcagctcatgatgcagatgggccgcctaccgccgggacctgcgagaagagacatgctatccgccttcattgctggcgtacaggcagttgcacgtaccttagccagattacacactcatagcgttgaagggcgaccaggcacagagtatctccagtggtattttaacgcagcaacaaatcgagtccagcaggcattgctgtacaaagaggttattcgttccgcgggactcgaagcggaccagctcccgcagaaaatgaatcaacttattgccgattgcaggcgtgatattgctagtcgtccgcgcaccactgtcgtacatggggacgcccatcctgggaatttcttctatgactgcgcgacagggcatatcactatgatcgacacgacgacgctacactgttctctggatgagaacggtgagccgcttggtgtaccggaacgagatttaggccatttcgtgcatatgctgcgacgaacaggcgaacagtatggccttacgcgtcaagagatgcaggagagcactactgattttgtggaggcatatcttgggaatgcagcagcgccaataagcatcgaaatccttcagttcttgatgtcatgctcggctctgtcattcttgaactatgcggcacagtcagatcagacaaaagtagaactgcaggttggaattttgcaggatttatttcgccttggagagggtttgacacaactggatggaatgcgagttttataaatagaaatcatgggctgctttgtacttagatatttttcggatgtcgtgatctaattcaggagttatgataataattgacactgttggatatgttcgatacctcgatatagttccctcttgtgtctctctgttcttttgatccactgagtagtctgatggcgcctagctttgctagcaagtgttcatcatcaggcaagatgtgccgacccatattcttgacccacttctcgaaagtgattccaatggagtgtgccgtatttggcggtaccacctaatgttgctggcaagacagagcgagaaagccagcagaaatacattggtaagcagccagactctatgactagggagcgagtagtttgggcttcgcatgataggattgcaggtagcagctgtgttcaacctgagcgtggctcttggagattgatcctgggacacaatcctgttttcatgagagaattcagcattaaagggctcacttcgcgaatggattcgcgtggatagtaacgttgttgattttgaatgcttcaaagtcatcaccctccttgggctgagaaactttccccttcttatcgaccttcacattcgccttctcgatatttgtaagaacatcacccccttcgtcctggggggtcaaattcaacaccttcccaaacacagtactggcgccatcaagatgtggcgccggcacgaacgtaatgaagaattgactcccgttgatagtagcgcccgttgcgccctgagagccaggcgccgtcctgtccttcaccggacgagatgccatagacagaatgcctcgcgcattgtgtcgcaatgatgggaggtggatttcttggttcattgctgccgggtggtatatcgatgtgccgccttttgggatctcgaactcgagcattggtttcatgcttgtttgatgcgcggcggggccgagagagatgtctccgccctggaccatgaatcccgggatgaggcggtgaaatggggtgttgttgtatgcgccgcatgcgcagagggcgagaaagttctctgcggtttggggtactgcttcgcagaaaagctcgaccttgaggtcgccttgggtggtatgtaactgttcaagttgtaattagcatcttgccgtaggaggtagagctgcagaatcattggaagccgtatttatatgtgaacttactgtaacagacatatttaggggattttgtaaggtaaactgtgcaagaggcggcatcgaggtaccccggggcctgatacagtgcttagtcatacttttcttatcgacgcgccgggcaatcgtcgcagatgtcccttcagttcagacacagttggctcaatttatattcaaatacgcagaaaggttctcggcaactaccttttgctttttgccttcttaactatccctgtcctgcctggtcccagccatatcctccctggcccctagccccttcctcggacaaccacctcaagaacaatgaacaatcggccggtggaacaggcgttgagcacattggtgccgactcatgccaatgaccttccgcaagaacttctcagctatgcaatgtcactagtggcacagtcccggagcttctcaagcagtctgaagccggaagaggaaattgctcggccttatgcctgcgctgaaatcgcttgcagaaggtgtgccacaggtcccgaatgaggtctttctatggctggcttgattttaagacgctaattgcttgtgtattgccctccttaggttgactcgggctcttaaattgcctccgctgctcggacgtccaccatgtcctccgcgcatatacaaaaagctttattcatacctcgaccgatctctcaactcaagctctaccggtatcaaacgctcagcaagcgtatcggttcccggaacaccctcacgtgccggctcagcgcagaccacaccgacgaagggcgcggcagccaggaacaccccttccaaggcagtagctccaacaccacgaggactacaaaatacaccttcgaagtctacacccttgaaacgaagtatgagcacagcgaaccggctggagagtccctcgaaatcggcaaaaaaggctacagcttcccgaacgaaggatgtttatgggtcaaccatcattccagacgccccagcttgggtaatgacagccgttcggactgtatgcaagattctttcgacacctgccccgcgcacaaatacctggtctaggcctccaatctcgaggaccctgccaccgcatatattttctggcgtgtcgtccgtcctctatcttacgtcgagcatgtccaatgacgaaccgggatgggaccgggagagcttggatttcctggaacctattgtgtccatcgatggatctgagaaggatgatgatttcaaagaactggtttacgccatggttgttgctgtatacttccttgtgctcgcgcgtcggcgcaaccccggaccagatgcagagacggatatcgaagcgcagaagatggataaaaagacatttattgaaatgcgtcagacggcactgaacagccttgggctgaaggctaatgaccggaggcatcgcgacgatgttgaccaatggatcactcttatcatggagcaagggtgggccaatgaccaggaatggtttgagaatatcccctatgctggacagctctatggcgaagacgaggaaggcaggtcctaccaagatctagacgaagaggatgcaacactcaggggcgttaggccgcctaaacgggcggcggctgggagtgggcctcgtgtctcgcagtccgatcatgctccgcggggtggtcttttgcctggcctggggacaatgatgcaggatcgaatcgactggctgagtgatgaccgtcaggaggactatgtgaattggaaagcggatatcatggcccgcatcgaaggtgcagcggcttaataaccgccgtgcgatgaaaggttattccgaaggggacgcagcctgctaatttaattgataccctaagatatgaatcaacatgtaatttctatattcatcctcgataagtaaagaaagcggcttcgccgttatgtctatgttttgatggtagccccttttgctctagagcaacccaatgtcccaaggcaccattctggtaacctaactaactccatgccccgtcaatgacgccaaatccaataaatactaacctcagtaccaaatactcctcgttcggtgatgaggaatggactcattgttctctgcctccaggcacttcatcgtatcgtacaagaaaaagtcgatgaggatcgcattgatgccatatgtcttttgtggtttctctacaatcttcaatttctcatccaactcatccgaaatgtcggtttcgttgttctcattgtcgtctgagatgcccttagaagggagcttttggcggttcattttgacctcagggtgttgtttttcgatctctcgtttgatcaattcaacacaccagatactcgttccacgaagctcgatttcccagtttgagcctggctcgatgggcttcaggtcgcggatatggttttccaatttaggcgcgtagcgaagacagttcagctggtgcagcatctgcggaatgcggtagtctatttatggttagattaggtttgaggaagttctaagatctgcaagaggcgtacctgcaaacatggtgatcttgtcgatgtcatggaattcaccaaagtcttcgccattgaaacaggcccagagatcggcgactaggatctgagcacgtttgtagagtcgcactctctttccgtggaagaccgtctcatcgcggaagcaggcaaagctctctgtcaatatgttgaccagtcctgcagcggagtgattggcgctgtcaatgcagttgacgaagctgccgccgaattcctatctctagttagtataggtcatagaaataaggcgggaatcatacctcgcaaaggacttcgcctgcttcacgtagacactgcactcgttcttcaaacataggaatttctccatctgttgcagatcggaatacatgtctaagtagctcttctgtgcacctctcttcatccacccagaagtcgggggttgtgattggaatatctgacgttggggtaagtactcatcattctagaagtagagttagatcagggaactgaccttcatcaagagctctttgtagagcagcaaccagactccaatagccagtccacagcttgccacgatactcaatacagaaacgctttggctcttcgtcctcctcagaccagaaactaaagttcagcaaatccattgtaaatatgaagtcgactgtgctttcatccttggtctttgggtgtagttcgtgctccgaccaggtgtgcgtggaatactctttcttctgcatcatactccatatagtttcggcagcctctttggtgtgagcaaggctgaccgcaatatcaattgcattgtcgaagacatattgagccccctcgagcactttagtttctggtggggcatcctttggtctttcgcccagtccgaaatgctggcgaagaagctctaccaactcagggtcggcttcatcgtcggaattggcttcgacctgatcatttctctcggccggaattggatccaatgatggcatgatattttctccttgtgttgccttgatcttgattcttgattgaaaacaaatggaagatatggagtcaggggtatctcctttgatatcgcgtggaaggattccggtgagaagctagacccagccgatattccaccccacctggatattcgaatcttttgaggctcgaacaagcaaggtgcgatataaaattacttgaattcgacgaaccctttgagtgaccggtgtttttttttttttcttgccacaccgagattttgtcccgatggtctttggatagagtcaccggttatgtaagcagacacaataactagttatgcccataatgtatctggaaagctctcagatatgcgatattgtggtaaatatcagtgatattgaggatttgcatctaggggcaatggctataagcgcaaaggaggtctgtacattatggtttgcagtgacacaggtctgcaggtctagattgattacctggtacctgagaaagatataactatggatagcctcgtcatgagcataaacaggcacatttattttaagattatactcacgttcattgatcatctaaaatagggcgatcagcgtatatgcgctagtatatgcgccagtatacagtgcgataatgcaaatgatcacttacaaggaccagaagatgagaaaagatcagaaaacaacgtcaattaaaactctacatctgcattttactctttcagtcacagaaaaagcaaataaaaaaaggcgtagaccgaaaggaagcggaaacccacgtgtgaggctcccagcaagtgccgtcatcgccaacggtcactgttcccggctcagcacttctttcacttgctccttctttgaccttttcccccttcgcaacttatctctaaaacagacgcgctactacagcactacactactgaactatttcaacaatacaacaccacctgatcgcgatcgtcatctactgcccgccatgcgggatagctccattaagcgctccctcggggtggacctcacccgctccctcaaagaggtaagtacagctctgctggttttcaatcctgaggtccaagtgatgttgtgtcaaaatgtattctgacagttctctcatcacacatagtcgcgcgttcttcttgtcggcgcaggcggcatcggttgcgagctgctgaaaaacctcgtcctcaccggcttcggcgaaattcacatcatcgacctcgatactattgatttgagcaatctcaatcgtcagttcctgtttcgacatgagcatatcaagaaatcaaaggccttagtacgtccaaccgaccaccccgcgcacttgcaccgctcctttgcgaatcctccccgactcaagcgcagcgcattcacatcgtgtgagcggttcagcgataggtgatatggaatactgagatatggatgctttcatctaggttgccaaggaggttgcgcaaaagttccggtctgacgcaaagctcgaggcctaccatgcgaacattatggatgcccagttcaacgtctcgtggttcgaatccttcaacgttgtattcaatgcgctggacaacatcgccgcaagacgtcatgtgaacaaaatgtgccttgcagccaatgtacccttgatcgaaagtggaactacaggcttcaatggccaagtgcaagttattcaaaaggtcagccaaactgatgcccggcttcgcaaattgggcatcttctgacgcgcgttattttagtcacaaactgagtgctacgattgcaccccgaaacaaacacccaagtcgttccccgtgtgtacgatccgcagcaaccccagccagccgatccattgcatagtttgggcgaagagcttcctcttgccgtaagatccagttccaatctgtccgctttgtatactcaccgttgagtagggaacttttcggctatagcgaagatgaggcagcggaggtggacaacacagaagacgctgataacggttggttcgatttgatctataactaggcgctgaaactgatttccgtctagcaaatgaaattgcagacctgcgcaaggaagcactggagctcaaagaattgcgacaatcgattggcaccgaggaagcctatcagaaggtcttcgataaagttttccgaagggacacaatacgattacagggcatgaaggagatgtggaaggaaagggatccaccagagccccttgactttgctcaactccaagaagaaattgcttcgatcgactcgacgatttccacggatgaccagaaagtgtggacgttgggggagaattttagtgtttttagggataggtagggactgtctgtcaccgatagcatactttcgataaactaacatgctacagcttgaaccggttggcccaacgtctgaaggaacttcaagcaaacaaccccccaggccaagattccccggccttgatattcgacaaagatgatgtggacactttggactttgttaccgcaacagctaatctacgagctgcgattttccaccttgaactcaaatcgaaattcgatgtcaagcgtgagtctatcaaataagagtgcacatttcaaggcgctcagtattaacacagcttctacagaaatggcgggcaatatcattcctgctatcgcaaccaccaatgctatgacagctgggctatgtgttcttcagtcattgaaggtgttccaaaacaacttgatgcaggccaaaatggtaagaaccaaagaagagcgcccactactaccgaagctaacaagccatttctctggaaggttttcctggaaagatccggtgctcgtgcgatcaattcagactcattgaatcccccaaaccccgattgcccggtctgttcccctgtggtggctcgagtcgaaattgatcctgaggtagcaacccttgaacacctcattcaaggcgttcttcagacggagctgggttatggcgaagaaatctctgttggtcttggcagtgaatcgatctacgaccccgatttcaccgacaatctggagaaaaagttgttcgacctcggcatcaacaatgagagcttcatcacggtatacgatgaaaatgaaccagagcgaatcaatctcgagctggtggtcattgcaaggtaagcgctatattgtcaagaatactaggcaatattgactgattgatttgcagaaatgagccatcttccaaagattccaagcccgcaacgctgcagaagatggtcgagatacccttgaagcccaagcagcctgtgcagccttctagcgatcttccaactactgccggtgatgcagttgaaaccgggaagcgcaagcgtgagggctcaagtgacgaggtggagctcagcagccacgatgtcaaacggctcgctagtgtatccgctcctgactcgaagggcatcgaggctatcgttcttgaggacgatgatgagggaggtgccatcatgatcgacgattgaatgccgaaaatagaccttaccgtagcatctcacgttattaccagcagccttcgcaggtattcatcttgacatcattctcttcatactttcagcattcccctttttttttgcttactacccccttcaacctcttctgtatcatatggcataaaggcgaacctgtttccagtcaacagggttcgaactcacaggttgacgagcatgctttggatatgggcatgataatgtatgcattttggggttttgtgtctcaactgctcagtggcgttctctggtttgatagattactagaatatgacctgcgaataacaacacggccacctgggcaaagtatcaaagttgcgtttgagctgaatcctgcgggcattcctgaaatagttaacggaatggaggtgttcttgcttcaaactggccggctcacctaagaactcgaagggaaatatgagagcacgtcatatgtgcaccagttgcctcgtaaatattatgaaacacgggaccttcgcggagggatagttaccgcatttgctaggactaatggtggatcaacccgtttgattgtggatgagatacatatttgttacagctgttggagaattttgacttattgattgatattacacatctagcttggatcgaactaaactgcacttaatccaccatcgagattgagcacacaattgttggcatactcattctgcgccaagaatacagctgcatcagcaatctcgcgtggatctccaaatcgatgaagaggaatgacatccttcagccggctcgtttcgcccggggtgaagtctattatcgaggttagtcgatttacgcacatatataggatgcccaaaccaacatacctgcaaccatgggtgtttcaatataccccggcacgatagcattcgaacgaatgataatatctttcattgaagccgacgcctccacggctaatgaccgcgttagaccaagaaggccagccttggaagcagcgtatggaactgcgccagttccgcccttgagcgcgagtagagaggatatgttaataatgcatttcgatgggggtttggtcctcgcagttggatcactccgattccgtacacgacttcggatggaagcacgcattaacgcgcgcgatgtaagtattgcgccttccagattagtacggaggattgtcgagatatcttccagctcggatcttggcaggatgtttgatatcgaaattcctgctgcgttgactaggatgtctacatttgcctagagggtaattaggatgagagtattcattgagatagatgagatcgcttaccatctccttttccagttcccgcatccatgatccggcatctgagacatctccgacaagtagacggatctttccttgcgtacttcgttggttgtcttcttccggggcgcgagttacgacatcgttggtttcaccaatttctggtggtatacccacaagagagccaagctttgcggctgcttcctctaagcgtttttgagatcggccgacgaggactatggtggatgcgccttcttgtagaaatcgttcggcaatggcgaagccgatgccggatgtcccgccggtgattatgcatcttcgaccggcaagtcggtttccaggctgaaatgaaaccttgtggttgttttcatttggctgagatgagtatgaccgctttgtatatcccagaggatgacttgatagtcgactgttgacgtagcctacattgcgtgtactgatcggccttgacgaggctcgaagaaataggattggcactcgcatgcgaatcaaaggaactctcaagctgcccatattgtttcaccttgtctcaactccaagcaaaacgcgatatcgggaacatcaggtgcgtcactggggcagcttcagcacggaccaacacgccaacctcagaaggctctttcgctccacagcggtcactttcctacaactacgcggatacgcgtacttcatcatggcgccatccacggaaaccgagtttgtgactatagtctcaagcgacaaatttgaattcatcatccctcgcagcgcagcttatgtctcggagaccttacggcgcatgctttcttcgagtacgtggactcgacattcattgctacatgggtagtactaaccacgcacagataatttccccgagggtcgcaccggtgtatgtgtcttggaggactactcgtacgtttcgcccttgtattcctttttccttttcgtgggcattgctaatgttctttctctgcagcggtgtcattgtcgaaaagatctgcgaatacttttgctacaatgaaaagcacaaggaccaggtcaacgtgccagacatggatattccacctgagttgtgcctggagctcctgatggctgctgatttcttgaatacttgattcccacgtggcgcctttagcctttggtctctcatcacctcgactgagacctcagatatctcttattcttgtttcggctcacgtcgcttttgaaatgattcacggcgcaatgacacaaacattcgacttttacgataataccatggggagttccagactagctcacatatataggcttggtcatggcgtttatgtgatggcatgtattctatgggatacagtgctcttacattatgcaagtatttttcttctttactatagcagtactctggaactttgtagaagacctcttatcccatctgagcatatgcaaacggttaatacatctatggccgaatttgtctaaagatgatggcagatcaacactttccaatgttaacacgctttgtcaatctaccactggcaaagggtttggattataggagacaaattgaacaagaaatcatatcgtatcatagagttctatacttaagatggccaatatcaacttaggctggacctcgggcattccggtggctgagtcagcacctaatgacctcgagagggctggggccggctccaccggggcgaacttccaaggaagtgcccgccatcgtgaagatcactctttcatacattctgatttgcgggatgcagttcacaggagcattgctcactgtggtgttcagtctggttgtaatatctttcggcttttgaacattctatttgcttgtgcctacagttggatgcactagcagccttttgtgttgattgcatctcccccggatcgctgataagggtcacccgcagaggcgcatacaacagcgactcatcatgtcaagcggcgtggaaccctcctcaataccaacatctagtgcggctttgttacaacatttgaatacaacattatcaccggagccctctcctttgtcctctttgccgcatcaactcctgacctccccccttcgcgcctttcaacacgccgagacctttgccttccgaacggttccccgaactttcgctagaataactggaattaaagcccttggccaaactatctggggcggggctggttcaacatctggagccagcggtacggccgcaacacatgcagcggagatggctgcaaatgagttcgccgatacagctagccaggagagtggctactacattgcggagctcttgggtgctatgaagaagcttggtggattctttgggtatttgacaagtctttggtcatttgcttgtctggtggaggtgagaccccgctcttgacttgtatacttaccatgctgatgggtctaggcgctcatcctaaaccgaattactatctatgcatccacacggcgacaccttcgactaggatgggaaaggcgtgcggctctccgattgattcctatccttctcttcgtctcccaaatccttagcctgctccgtggaatccgatgtcagacatcgccgtctttttcgacaatgcgctacggatctcccggaaagcaactcgtattcgactattccagtgacgggggtgctctttactcaatcagctcgactcttttaggatgggagtccgaggaacggtcgtgcgctgctgtgaggatggcgcgcggaaccaacccgggtgtcccatatggatcattttccctactctggccgacattcatgctcctttgcttgagtcacttcatcgaaacactctcttgcgcattgcaaggcaagcctgtgatgactgagacggggatgtccatcttcgagcactcaatcgccttcgcagaagccgagtcgatgatcagtaaatctatcggactaggcctgttcggtcttcctaaacaaagccctcttagtgcgctttctggtgggtctgatgctaactcaacttcggtctttgaacttctcacaaggtcgcaagttttggaacgcatgaatgtcacacccgaactgctacttattgtattgatatcgtgctgcaatagtgcaacttcgcacatactagaagtcttcggcaagcagagcaaatatcggcttttcagcactgcattttggggtgcctgcttcatgatagccatgttgtgggggttagatggcggtccgcccgtcagcctcgaaaccggcgtgctcaggttcccgactgtttgcattgtgggattcatccctcatatctttttactgggcggcatcgtgatttgtctctcaatatacactttagcacttacaatcaccgctttttcgctgccatcggacgatcaacctgtctccctctatgaccgcttcttgatggcgcatgagaatatgcaaggctcgaaccagataaggagcatccgtattaacagacacgaagacttttatacaacgttgcttcggatcgggtatgttgccctaactgcggcaagtgaggctgtgttcttgaacgagggccaatcagtcgttgcacggcggatgacgtggttagaagaggatcgcctttctgaaattgaagcctctaggcggaagtcttcatcttatgggaactggcagagtcagaccagaagccggcctatcgaggctatgggtttctcaagtttcgacatgccagaacaatctgcttgggagagtggctacaaccgcgaaaaaaagattgagaaacccaagaacggtactcgagccgtacaatctcgagccgagcttgggggagttggcgcagtgcgagtatcgattagattgtggcatgtcctctcgttcttccgcgcaatttccctccttatgctccgttgggttgcatatggactcaacaatgtgcttgatcgactagggataaacgctcggccaatgtggctcaaacgcatggtgggtcatcgtggaaagaagtctaataccgacaagacgaacccatcacagccattagatttctggattctctcggaaaatggagagcttgagctccccgatgaccatgactttgatgtcgagatcgagatgaggaagcgagagcgcgcgaatcggccagactggatgggctcggatgaaagccggctagaggacagactctacagctggtggaaaattggcggtgcatggggaaaccaagatcaaacctctgattattctccgccctctgatgacttcgacaccacgagcgtggtgtccatgtctaccaacgcctcggattcagaatgggaggataacctatcggaagatggtcgtcgaacccctacccagctcgatccgtatgcagacagggcaagcccaccactccaagatcccctgatcgacatgagcacactcgcccgtcttcttgacccgcgcgaccgcgagagcagagaagaggccaggattctagccgcccatcttaaaacaaacccggacaacccacagatcatgacgcgcagtcgctaccagaaacaagttgaaagggagagatcccgaatcatcttctcatcccgcctccagcagctgaacgctatgaactcagaatccgaagggcggaaacctactccagaagaggaagctgaactcctcgagaagctcattctttcccgtcgctcagaaacctcgggcatttccgactcccatacatgggaatccggggcaacaggcctcggacccaatggtccaccctgtgtggtctgccagacaagcccacgggccattatcacctggccctgtcgctgtctatgcatttgcgaggactgtcgcgtgagccttgccatgaacaacttcggcagctgcgtgacttgtcgccaggaagtcgtaggcttcatgcgcttatgggttccataagtcaacctatttgtttcaatcgctcagtttttttagcttgcactcttttatctttggctcacataggttccatatctctgaacagtttgtaacatattacatttgaagacttttgcttcgtatggcgatttccagaccgtgacttatctattcgctaattgtgttcttgctgagaaggctggtcgttctcgtctctcctagtgatttgcttgatcaatcaatattcagagtatagaacttgctgctccaatctttttctactaagttgtcaaaaaagtcactcagctttatcaaattcgcatggctatcagtcagcactgattttgtccgtctgtctcaagctggttaagaatatcagaagtttaataacggtccttctatgctaacacaacttaaaataactagctataaatcgtccagagctttccccgtcaacgcgaagtgctttccaagtatctgccagcctcatctgccagcctcatctgccgacttcataattcttggcgatcctgcatcttccccctccacccctgttcgacatgatgtcttcttctcggcttcagctggagttaaaacaggtatggaagtcttcctatgtggtctcgggaactcaatcaagctcacgcaaggcagacaatctttctagcctgccatcccaagcccattgccacgagagaagtcgggcagctagatccacagcaaagcacaatacaccgtctggaactcgaagcagcctcctctccacccgattttccaaagatagttaccatcaaacaacaaaaggatggatgggaggaagaagaatttcgacgaaaataatagcatacaagcggcttcaaagtcttcaaggaaaatcgatcccaaggcttctaggtgaaggcttcttcaatgaccgtccatcaatctttcggaaattgtggggattcctttgcatcagcttgcccgggacgatacaattgaggttgacgaggaagccttgcaggctggtcttttggatgcttttcggacgctattcgtaaaggaagcgaagtattgggatcagaggctagatgatttcctatttcgtctcgacagggagtacgatcaagagagagtggtgattgttgatctcgagcaagttacgtttcccgaggagtctctcccttgggaagaatctagtcaaatcagggaagaaagcatgaactttggcacggcatgttcattgatgagggctttccgccagatcaaacgtgcaacgccattgggctggactagtgggtgtgtcggttgtaaccatgagggaacaattcattgtgaagaaaatggagatctgctaattattaacttgtgaacctgtcaatctagtattgtgtaagattactatgtagaagggtaacccgtttgtaggaaggaggatacagagcttaggcaacatgttagattacttgattgtgaatgaggcctctcttgttgcttgagcagggagaaccatgactgtatgtgaaatagggaatgaatggttgccatgaaaagcaaaatgagaaagtataatctcaatggaaccatattacataccaagaaagccttggtattactcctccttatagaccagaggccggtactcagcctcccacatctggattcgaatccactctcgtagctccgattcactggtagggataccctctgcctgtgccaggccctcctccacagcacacaaaatcacggcggtggcaatgtccacgctgatttcgcgcacatcttctacatcgggcagcaacggcttcatagagtcttgtagggccggtgaccgtgccttgagtgcctcgacggcagcgactagcatcttcttggacacaagacggcactgcgagaggactgctcccaaaccaatgcctgggaagcaggttgagttgttgcattccgctgaaatattatggttaatatactgaacagtcaatgtccgggacgagatttggatacctaccgatttcaaattgcgtgccgtcatgggcgactggcgggaatggactacccgtagcaacgagagctcgcccatcggtccatttatagagatcaaccggcttcgcctcgtggaggcgtgtcgggttgctcagcgggaagataatcggtcgttctacatgctcggccatcgcacggatgacatcttcggtgaatgctccgggcttggttgaggtcccgataagcacatgggggcgaacctttttgacgaccgacagaagatctcgatcactgtccgaccacccatcgtcgctccgtgcgaaaggtttctggccttcggtcaacttatcacccatggacttcataaggagaccgggcttgtcaatgcacctagatgaaagaatggtgttagcgggggtgtttatcttcctttttcgcagttacataccagatctgctttgatgcttcgtccttcgactttcctgtcttagtggcgatggtatctgaaacctggtcggcaatgccggtaccagccgttcccgagccgaagatcactactcgtacatcctccagattgactttgctgacttcaaggccagccaacatggccgccaatgtgacacatcctgtgccctggatgtcatcattgaaacagggtatctttgacttatatctatcgagtatccttcgagcattatccagaccgaaatcctcgctagtcttgttagccgcgtttcgaacaatagaaaggagcatttctcatacaagtggatgtaagccttggggaatcggttgcgggcagccgcgacaaatctgtccacaaactcatcgtacttctctcctctgacccggcgctgtcggaggccgaggtacagtttgtcatcgagcaactcctcattctacatggtgtcagcaaatgtagacttaaccagataataggtatacctacatttgtaccgcaatctagtacaacaggaagctgacgcgaaggatggattccagcacagagcgtggtaatagccagtttggcaaccgatatgagaattgcacccacaccttggtctccaatgcccaaaatctgccaacaattaatggtaagcagggtatcacaaactctccgtcaagcagatatataattacctcttccccatcactgacgacaatatagtcaacatcctcctcagttccaaacccagagagatactcatcaaagttatcctggtcattgatattcaagaaacacccttcaggctttctgaacaatcgcgagtaattctgtatcgcatctccctcagtaggcgtgtaaatcacgctgaacatctccttgagattggtttgcacgagctattcataggttagtaataatgcacatgctgatgttgtttcgggaagatatcagaaccttatagtacagcacatcattctgagccttcatgctagccaggaaggtattcttggctaggtcccctgctctgctttgatactgctcataagcgcgctggacctgctcatccaatgtctggatgttcggcgggaggagactgtggagcttgaatgttgatcgctcatggtctgggaaggccgatcctttgttatatttggatccatggaggacatggtttccctatttctgtgtgagaatcggagcttataaaagaatgcggacgtgtggtcaccttgtatgggcaaatcacaggccccggggcgcggggtagatcgcggaatttagagctagagtccgacatttggagccaatgccaagggatacaacgttgggatgaagaaaagcagagaaagattggaatatgagaaagaaatggtagtggcggggtgtggagcacccgtcatcaagcttctcgccacctggacaagagcgcatataaaggcttatcatcatcttttgagaacatggtacaatctagtatatatatagaacagccaaggtatgtataaatcaaaataaagtaaacaaagaacacaagtataaacctaactttgtccttgctggtgatttacatactttttacctttagtagataagttactacaggattaagaatcctaaacctgctctagctgcctggtctattatattatatatagcttgagagatagctatatagtttggagtactttgtacaccatgagcaaaaggtgggcgcatcgcccgtgaacccccgtacgtgattattaagccattagtgacgtcatacaattgaccccgcattctcctttccatttcgggaatagcgccctcccctctaaattgggtttagcgttgtccagcttctgtttattccagccctactggtacaagttggttgatactcaagatgatgatcattctaagctatgctactggatgatgatcacgtgaagtcacgtgccggtgacaacaacatgccggccccgaaaaaaaatctcgtcccgagattgaactgttatgccgtttgggagaaccgtttcggtggctttatgcgaaggtctctctacgtcagggggctagtggttcgcgggagtagcttgttggtggttcgcggccaggggggctgctgttgatgtgacttggtacgcggtggtgtagtcactttccttgacggagccgatgcgggtcgttcttccaatggtctgagaaaagtccgtattgtttgcgatccggatgaagccgaagtttgcgtcgatagcttgttggggttattcgtcgcttggcgacagagcgtggagacttggctctgcgtggacgaaggcttgaaggatgattttgcttttgaaagatcctctttttttccaggagaaacccactggatgctaaccagacatgctaccaaagttacaagttggttgatactcaagatgatgatcattctaagctatgctactggatgatctaagtacagtgatcacgtgaagttacgtgccggtggcaacacctacaatatagaccttcattcgaggttctggacgtaaccaccccatctcacaagtggctgatacataacaagatgttacctatcgcactttgctctcacgacaccttcattttcactttacttgatctttactctctatttatctttcctggtcttacggccaaatgagagactaccatggtaggtcctattgatatgactcgatgccgcctcctataacatcctagtcttcatttacttcctagttgatctcgcatcggagtcccaacacttaatctagtattcttttcagttatctcttactaaatcttcactttgtccttaggttcttcttcctcctctcttcttgtaagccattataaaagctcttgttcatttgaagcgagagttcaaccatccccgatatgaccaaatctattgtgtctatctctagtatcaattccgttaactccctccatttgcaatacgaattcgcgatcaagtgcaagtgggttctcggagagaagaatatcataatctccggcatcgtggactattctctttggtttggacaggctgggaacctagccaccaatatggctatggtggaaaccaaataatgcgtggtggtttattcatcttcgtgacgatggaaaggtatgaaatggagatttataagaactttgggatttactgctaatatatgttctagtacactgaagacacataccactggcattcagacgcctgcgaaatcatctcggtcatttacaaaattatgcagcatgtctgcgggttggaacctccatcaaggcagggtcgcgagttgagcagacccggaaccgaatgttcccggttcaaagttgtgtcgtggacactacggccgtaaatgatactacagctgctgacggtaccgataccaatgatgaccctctgccagctaccgagtacgatgccagctcactagcggatgatatagccgatgaaagtgacctgggcctgcttagggaggcacttatcctacctaaggacggatggactacagataacccaaggctgaggttacctcgcgtactaagaaccaatatcacacgatacgccttccataccgagcgaactttcgtactcgcactctgctgcctttacgatgaatcttccctgtataccttacgttaggacaaggcaaatatatctcacccaattgatagccagcgtaacggcaagagacctggccctttatcaggcggaaagatcgatatgcctaccgtcgcgacatggttcgttttccatttctcaattcatgactactaggacaacctcaagcacaaatcccatctcgctttatcttacgttcgcctaacggacgagggcgttttctactgctcatacaaaatgacactgtactaaagaagttcgcggtttcaggctgactttgactaacacagggatattcgtacctcccgtgtgcctctggacccccttatgattgtataggccaacggattaccctggttcccggtctataaggcgttctacgtcctctgtggaagctggagccctgcgtcataccttgtgggaagaaagtaccgctctaagatcacggatttttacattggcgcggaactggccccacctgccgccgtcctgaccaaacaaagtaatgtacatgggtaactacctactagttatcgtcgcgggtttttgggaaccttggcgggtggaccaggtatctgattacaaatcttatcttatcttgactatttatggagtaggtacctactacggagtactttcactctactttcactctcttaatccgtatataacgaaatcattctccaaactcaggcataacttcacacaaggagagaaaatggctcccacgtacaatgcaagcaccacggccgctgaactagtcgatcatctcgccgccgaaatccaaggcaaggtgattctcacgactggaccctctccgaacagcattggagcaaccttcgtggagacgatcgcacgctctaagccggccacgttaatcctggcgggacgcaacacggttacgttgcagcaaacagcagacgcaataaacgctgtatctccacaagtctcagtccggctgctgcagctcgatctggcctcgctgtcttcagtccgccaagctgcgtcggaggttaacagctggagtgatctgccacatatcgatatccttgtcaataacgcaggaattatggctactggttttgcgctcactgcagatggctacgagagtcagtttgccacgaaccacctcggccctttcctcttcaccaacttggtgatggataaaatcttgaattctccatcgccgcgggtggttaatgttagcagcgatggtcatcgactcagtcctatccgctggggagattacaacttccaggtaggctagcagtttcgctccccacttgcatatctaatgtgttaatgtggcgagttgcaggatggtgaaacttataacaagtgggctgcctacggtcagtccaagacaagcaacatcttgatggctacccatcttgcgcaaagactgggttccaagggccttacggcgtatagtttgcatcctggtgtcgttttcggcactacccttgcgaaggatctcgactggactgttgacctcccggcattgcgtaagtgattatcaaaggtattcagaaatcccgcatggctaatctcccctaggcgctgtcgataaatttatggggaataaggagggctggctggagttcaaacaaaaaagtccccaagaaggagcggcgacccatgtgtatgctgcgtttgagccaagccttcgaggtgagacgacgacccccattcgaccgatgtacatgctgatttctctcaaagatcacaacggtgcatatcttcaggactgccatgtagcagatccttggacggataccatcaagccctgggctacggataaggtcgaagctgaaaaattatggaagctgagtgagaagctcgttgggcaggaattccgctattgacagaacacagtagggcgtcacgagggagaataaggctggcatcgaaatgtctctcacttcaaaatataggagatggcaatgtgctgtactgtaacaatccatctccttgcatggacaagacctcggaagacattattcgccccagagatatccgctcttggcacttaaatggcatcatccatcctgcgagaaatcaagtgaagtcactctccatgctgtcggtcgcagaaaaagcaaggaaggtctcaggaataattgtgctgggcgtgtgctggcgtttatttttcggaggtagcggtgacaggaccctagtaggtggatagtcaccaccaaaaacaggattcacgtctccaaagcaggattaccgtctgaaataagtcgtacgttttaacttatgtgggcatctctccatatccttctttttttttcaatacagcctggaggactccgtactccgtagtgtatgttttcctccgtggttaggcagctgtgacgagcggaaggtccgggagaggacccctagtggagaatactttgtgggtagcgaggtgattggctggtcctggcgatatttatgggtccgacggtcctcccgaattttaataaagagcctccagggatcagtggcatcgcgaagaccctaattgtgaacgttaggtgaatagaagtctgtgtttgactaccaagtctatgtctactacacaaggaccactcgatatctcttttcccctgtttttggcctctttttcacgatcatttcctgtatcacgctagtaatgtagccgaatgctagcaatggcttcggtaagccacagcggtctaacatccaatgagtggtcaaagagtacggacacaggccaatgagagagctttgtaaaatgagggctcggagtatactacctcgctatattccagccgctaggtaactaaatagtctgactcttttccatttaaaggggcgcgtgcgtccgtcaattgaattttgcacctccatctctcttcacctctacctttcctttcttttcctacctcaccgtgtgtccaaaacatcaacatgcgtacctcctttttcctcaccgcagctctcgctaccctcggcacccaagccaaggacagcagcagcagcagcgaaatcatcggctacttctctccttcctgggacgcaggccttctccagtatggcggttggaccagcaccgccgccagcctcgtcgcctacaaatccggcacggccacatatcacgtcggctgtctgaaggacgcgcccaagaccgactgcaactacccgtcctcgtggaccatcgtccaaggcccggagacagtcagtctcgatgggaaatacatcgcctctacctcggacaagacctccagctacgagatgactgtctcccagtcgtatcattgttccctgaaggcgtcgaccgagtccgccagctgcacgatgagtgtcagcatgagcggaagcgtcgacggtgcgaaagtcgaatcttctacttccagcaaggcgacttacaccactgccccgatttcggcttcgtactaccagctgaccgtcaccgcgggcctggagtcgattaccactgagacggctacgacgactaagtcgaccggtggtgctgcgggacacgctggtgctatgattacggctgcgcctatggttgctgctgctctcgctgctttgctgtgatgattttcaagatatttcgatcataaggaattacatgccatgactttaattgactgacatcgcgtaaagatctcgtagactggatttggtaaatggaataacgccaaaagtaggatctcttgttttcgtcgtttagcattggtgtaatatcaaaggtcatttctagtttcgccccagcagtgaaaagaccttggcgctgtaatacaagtttctcggagatatatatcttacatacttagtgacgacaccgaactcgagtttctagtttggatatatatttaaacagacaacagagatcaaatcataaacatccatttcacccaaggggtaaaacaagacgtgcattgtattaagcgtgtcaactatacagggaggtaactaattcaggggtctcgcacggtcagccctgctagcaaacaaggaaacaaatcctatgccagcacaagcgagcgaaaacaccgagaacaacctcatattaggtatagatatatttacaggacgtaagcggcagcagcggcgaggacagcaacaccagccatgttgcccttgacattggcaccggcgccagtgtaggtgggcgagggggtggcgccagaggatgagccggtcttggtcactagcggggtggaggtggcaacgccggaggaggagccgacgggggaggacccagtggcggtggtaccggtggaagaggtctcggtctcaacggcggaggaggtttcaacagccgaggacgaggtctcaacagcagaagaggaagtctcaacggcggaagacgaggtctcgacagcagaggaggtctcaacggcgctggaggtctcgctagcagacgcggtaggggttgcggtagtctcagcaggggcagagctcgaggtgctggcgctaacggtggaggaagcgctggtctcgacgggagggaccgagatggggtgaccagcggaggaacactgcccaacgacggcgttggagacagctggatgagtgagttagtgggatgtttggatcaaggggagcaagtagatgggtgttaacatacagacttggtcactgtggtcgcaggccttctgaacacaaggagtgatgctggtcacgagctcggtcttctggcagtggcacttgaagtcgagcagctcggagcagccatcgctctgcaaggcagagatgaagcagctcagctggaagcaagtgttagtaaaccatattctttacatgtaggcatcggttttcttcgtaccgagcaggcgggtacatcgggcagctgggcgctggcgagaccggcagcaacaaaggcaatcagagtggtggagaacttcatcttgatgaattggactaaaaaatagaagatattatgaatggcgtgccggaaaagacagtcaagtattgtatagcgagtgcggatgagttgagaagaggagccaggtctggacttggggagctggatgccctttttataagctttgccagtcgtatatactccgcctgccccatggagatacccctgtgacaaggttgcactcagaggctggcgcgtgggaccatcacatgtctccgcatgcttaatgggaggcaatccaccgaaagcaggcttcggccgcggttgactcagatctgtaattaccacggattggctgagttcaaagccaagcctgaaggctgatgccggataatgggttcccgcagccgattgagcaatgagcgaggattgggttggtgctattgtctcgtacagcgtacgtatgcgcgcatcgccaagttgagactagatcagacgaacgagaaagccaccggaaagactggaccagtggcgacgttggtatgtagtacacttccatttgcggttagtcatacggtgattagggccattgggtttaatttccacatctcgggccagactgctagtggcctcgatggacgacggtacggtacggagtacatgtggcgtggttgtgcagcgttcctactgcccactacccaaagtctttcgtcaattggctataaattatgactccagcatatgtagatacgcaagcctgccagcattgaaagcaataaatgtgcagaaagattcgcaaaaaaagaccaatggggtggcaaaccccatagtattaggaaaatccggggaagacggttggaccccggcagggcccgagagagggtagcatcgaactataccacattgggacttggtccgacgctatttcataaacaaggcaatataatatatcttgtctgaaattgcttggggtaacacacggcgccatcaaggttatggaaagggtcaaaactcaggccacgatcaacaaccttgtgagctacagaacttgtccaatatagggtttatgggtatacagggttgtacattgtagccccaaagacatcccggcgttttctgagtttcattgggcttaatagagaatcacaaactagaaaagattaccgaaacgttagcattctctgaaatatgactcgatcgtgagatattgtacctgcatattacgatcacccccagtggcaacagggtttaaatgttacttccaagtgaaccatttcctgttatttcctaagaaaatggccttggccttgccaagtgagacatttagcgggggtgggccgactcaagacgcagactggaccagatacatcatctttgactttgacagacagtgccaagcacactagcattcatttgtagcgtggggttggggtcaataagaaagagagttcagcaaaagcagcaaaatcaggaacaaaaatacaaaagcaccgatcacatgagacacgactcctagttagcgtcgccaccgagactctgttacgggcgactaaatggaccatcggaacataactctctacagtctttctacatctgcaattgtgttgaccacctaccatatgtatactcttacaaaatcacaaggtcttacgtatgtatcacgtgaccgggtttcccccataagtaattatcctatcatgtgactggatagatacactagtcccaatatggcaagcttattatttctggaccaatcaaaatgcattcatactacactcatattcaggcattgagcatattctatcttagcatccaccttctctatcattatggcttccaaaacatacactagatgttacatttacaatttttgcttaagtgagtcctaagtgaggtctaagtgaagtctgagtgaagcctaggtgaagtccaggtggacttaagcaacctcaagaacggcatgcagcggcttgagaatgaaattcagcagctccaaaagtcatacaagctccaatctcgccaaagtatcctcatacgtggggctgagttagatctctcatgattgaccccgcccatgcagaaatctggaaatgcttcttctatcagcactaccatttgacgttcgagtattcccacgagcaactccgcgattttgtcgatgtctccccttcgatcgtaaagattttcaatttacgggctgatatatcgataccaacccgtgaatggcagaaggtcgaggtgtgcgaccaaaacttctcgaagcctacgatacgtacatcgaagccttccagcagaatcaaattactgcggctccgatggaactcctttcgctggcgaaaagtcgcgggcagcctttttgaggtagtgagaatctcctttgttttctgttttgttttgctttcatatatgataccctctttcgaaatgcttcaattttctgtagcaagatcctacttgcattttcctcaaatcactagcttattacctgcttattcctagccctattttccactactgaatagcagccatattatcctagtgactataggcataccacggcttttctagtagagaaatgtcagaactagctcggtgtccctcaaaaggcaagctgggggtcagaagatcttcaattcaatcatgaccgccgaaggtatcatttctatgaatacccataggtcattcgtatctcattaatatcccccacaaacgcccgatccatgcaagtatgtcaacgccagttcaaatcacggtcccatatgttctcaggataacaattcatcaatatatgctcgctcgcttatatccttccccttgagaagaaccgcaaggacttcgatgggcgggttgagcttcagctgattagcgcgtctccaccgcttgactcgagcaattccaatgcagggctaaagagagagtaaatatgttagacgacttattctaaaagagacccggacacataccccatattggctggaaagatcgaaatgccggagaatcttttcctccacatccatgccttgctggtgggctgttgagcgcaatgagccttttaattcatactaacgccctgtgtgccaacctccacttaccactaggtgtcttgcgggcctgctcttgagcccgccaatatcgccagatatcctgcttgttcaatttcagtgcccggttgtcctcttcagatcggggcgcttggtgttcgactgcggcttgttgtcgcaccgctagctctgcgacatggggcttggagggttcttttggggtgatggacagctgctggggctctggggtggaggcagatttgtcggagagcgctggagtcgagtcgagggccttggctttgtgggatggtgcggtgactggtttggtgactcgagcccgggctccgaaggacagtgtcgactgcgacctgggtgtgtttgatgcgcgacgaggcataatgtagaataatgtggtggtttgtcgttgagattggatatgcaatgttgaagaagttaaggtggagaatgaggcgatgtcatggttgcactagcaaccaagggaaaaatctacgaaggcccggtatttagccttccatggttcttaattgggacgttttatattttttatataaattatacatcgattggcgtataaatccacagcggatgtgctaagatttattgtttatcgatttaccatgtgtgatgacgatgatgacattgacattcgaaactgggcgaacagtgtccgataaccattacgtctggtagaaattcgagatcgggtagatcttcctaaatagtcgtatatatagcatattagacctctcgagatatacagaagaacctaataataaatcaaaggaggctcaactcaatcgtggctgttggggggctcagttcatctttccccacccacagccactgtacgttctggaagcccttcacctctcctatctcgaacctcaaagcctcaagacctctggacaacttacccttgtcgccctcttccaacctccggcattcgaggaatccatatgttcacacagttcacctaacccaccgaacccttatgaaccgtgcgaaaggatccgtccactcgcatattccccacaacccgaccaacctccgcatgtctatggtgcgacagacacggcttactcgagatggccgcctttgtgcgcgtatcagggccggcaaacggcaatttcctgatcggatacccaggcatttctgcgaccatggtaagcgccctgtgatacatgcgacgagccggttcggccccctgcgcacgcggccccattgattgttcattgactgactatccaagccacgaatcgagggtaaagttgaaatcagaccctgcgctggtattacagctcccgtcaacatctccctcgtcactatttccctcctccgccgcgagacaatccacccttcggccgacacctttacgaagaagcgcctggctcccccgcggaaagagatcaccgatatcgtcggaaaagagatgctcctatttcgatgtcccgccggccgagaatacgaggaggtaatatctatggatctgccctttgttctctttattccgtttggtcgtggcggccgcgatgcctctcgccgtgtacccccagctagtttacagctcccgagtcgcaccgccgagacctactacgagatggtggtgatggtccaacaagggcagcagcagcagcacaaatatacctttcccgttcctatcgcccgctacgacacgctctccacattcggcatgtacaatcgtccagagtcggcagagcgcgtatcagatcatctggtcacattagccatatcactgccacggtggtcttacggtcctctcgaccccgtgagcgtctatgtcaagctgtcaccgaacgagagctggatgggcaaggcgcgtaaggtgaccatcaacaagatcaccattggcatcgacgaggaaattgtctacaaccacgaaggcgatgagcctcagcgcaaagtcaaggtcctagctaagaaaacggagaacattggtgttaaactgccccaatcgggctatttgacaaaccttggtctggtattccccgccaaggacctccgcgacgcagaaggaatcttgccgagaagtagggcggcatttccaacgtacggtgtgagcggtttcacaaccacagcaagtctatataaaatcgagtattacctcacagttcgagttagttcttccctagttccctggtatttccccaatactcacacgacagcaggctcacttaacctcggcaagagacattaccattcgacaaccaattgtggtctgccccctcgaccatgccggctgcaaagaagaaatggaagcgatcgagcaagccgcacgagatgccgcccacgtcaacccggacaaccccatgctacctcttccagcaattgtgcgaccaaacgaccacaacgccctcagccatctaggcgccgctatcgtcggcaaccagaagaaaccattgattgactgagatggagatgatccaactcctcagtaccaacgatgatacttatttaataaatccctcccttccccccgtcttgataccggagctcctggacggtaatcccacatacggggaccgacggttgccattacttttgatgcggaggctgaaggctcctccgcaaccacgctatatcatgacatgtcttacgattgcatacattttggagttggttgcgtggcattcctggaaactggctgttcgctgtttatctgtctgggcaaaacggggattacggggtgtttgggctacttgtttggagatttggtcgagtgtttccttgcctcccttgacttctttccagtgtctccccgctgcatacgtgtattcggtcttttagccgtttggtgcttctttcattcgcacagacccagtcaagcatctgctcaaatagtgatacaatttgtatccatttggaatcatgtacctattaatctgtggatatacggagctatggatctatggtttcaggaatcatctatcctcgttgctgtgtatattgtcttttggaatgcaaaatcgcttcacaagggtatacttatgctagtttgtatgcctttccaggttcctatccccctcgaccacgaccttatatcaccaccctatattatacatgcagcttatttcccaatttccagaaatcccatggcaatgcttagcatgtctccgtcaaccacccgggctttgctcttctggctctcgttctcaatgccccgaagacattctttcaacatttcaagtatggtttggtactgcctcgaggagggtccaaaggtcttcagggcattctcaaggctgtttgatatctatattttgttatttcctgcgtttcgtagttgtactgggcgatataccttgcgcaaactttcgttatagtccacgagatcttgacttcttccgtccatctcatatcatccaacaaatatgcctgatatttcgaaatcaaatagcttgactttgtgaggggcatatatgtccaactgaccgctctcgtcaccgcctagttataagaggcaaatcgcccttagccgggcgtcggggccacctccagctccctctccacttaagctcggggctgctttagctacctttgtcccttctgacatcgtgtctttactctacgcttttcaatcaactcatctagcctcttgagaaagctccctcctcttatccaagcccgaaatgtacaaaaaaatcgtcggaggttgcatccgattatttgtggtcgtcttcgtcatcattgagattgagaattacaccaacctcattgaccgatacccgatagcttgtaaagttgcatttttcctagcattgttcggctttttatggctctatggcatgtacagagatccggagtctgaacttaatcaagacgacaaggacccccgacattgaggtttgcaagaaacgtttgcttttcgacaaaaggctggaaatatacacaatgctatgagccgatggctttccccgcgatcacaatgcgagatgatgcttttaatctggcccaggcggcttggaaatctgaccgattccttgtttcttgctgtgtttgttctcttgaatcacttcaatagcttagatcttatcctcactaatattcataacgtacttactctaccgcctgctccataaatactaatactacaaacgctagggtgcttacatgaacctagtggctcttcaacgagtcagtatcattcttactgctgcttctataactgtagtgacctatttcctgtacttaaagtagcatttctcctataggacacaccgttcgggttcgatcgacttcgggtcgaggaccctcgttactgcatattctttccaaaccaaaaagagcattgccaagattgaggagtaacagactgcgttggaattgaaaggtccaagccaatgaacgacgtccaaaactgccagcaacacggagtatccccggggttcctccgcatctacgatttcacaagaatgacctccagcatatactccaacatactccgtatacttgtaggtatcgcggaagttgtttgagcagcatttcactagttatagttaagtcagcaggctggtggaaggtgcttcgcaatggagattcattctccttcgtccttgattgagatctacatagtccgagccaaccttgcaataccccactttgatgccggggtaaaacatgttggggtaaaagatataaaaaggtatgtgtttccctgattttgggtttgaattcccagcagcacagctaaaatggttcacttatcaaggggtgttgtggccacatgtcttactctccttgcgcattcctccggtattacggctgaagaatcaagcacaaatcgtgagtcctgtgtttctattagtttctcatttcctaaacctaaccacctcctatagcaatcgtggcagatggtacttcctttgctctcaatggaaataatgttgcataccgcatccatgtagacaataccactggtgatctcttaggagaccacttcggcggctctgtcggagctcatatccctctggaagttgtaggcgacgtccatggctggaatggttatatcggacgtgtacgccgcgagttcccagaccaaggccgaggagatttcaggacccctgcgattcgcattcgtcagtcacaagggtataccgtgtctgaattccagtacaaatcgtacaagatcatccccggaaagcctgctctacctgggttgccagccacgacgggcacagaagaagatgtgagcaccttggttatcagtctatatgacaagtacagcgatgttggtgcagacctctcctactcgattttccctaagtatgatgccattgtgcgcagcgtgaatatcacgaatcacggaaaggcaaatatcacaatcgagtctctggcaagtctgagcgtggatttgccgttcgaggacctcgacatgataagtcttcgcggtgattgggcaagggaagcgcatcgcgaaaggaaaaaggtcacgtacggcacccaaggctttggaagttccactggctactcctctcacctccataaccctttcctggcattgacagagccttccgctaccgagtctcacggagaggtatggggattctcgcttgtgtacactggttcattctccgtgaatgtcgagaagggctcgcagggcttcacgcgtgcccttttgggtttcaaccctagccagctctcgtggaatctgccgcccggggaaacccttacttctcccgagtgtgtctcagtatactccaatgatggcatcggcggaatgtcacgctctctacatcgcctgtaccgcaagcatctcatcaagagcaagtttgccaccagtgatcgtcctacgttgttgaacagttgggaaggactgtatttcaattacaatcagagtagcatctacgacttggcaaaggaagccgccgaagtaggtgccaagctctttgttctggatgacggttggtttggccgggaatatccacgtctctccgacgacgccggactgggcgactggatcccaaaccctgaccggttcccagacggcctggggccgattgtgaagaatatcacggacctgaaagctgctaactcgtcaacgaacatgcgcttcggtatctggttcgagccggaaatggtcaatccgaactcgactctgtataacgagcacccggactgggccttacacgcaggaccctaccctcgcaccgaaaggcgcaatcagctcgtgctgaacctcgctcttcctgaagtccaagactacatcatcaagtccgtctcagacgtcctcaagagtgcagatatcagttacgtcaagtgggacaacaacaggggtatccacgagatgccttccccggccacagaccacgcctatattctcggcatgtaccgtgttttcgatgaactaacaacccaattccccgatatcctctgggagggctgcgcctcgggcggaggccggttcgacccaggtgttctgcagtacttccctcagatctggacatcggataacacagatgcaatcgatcgcatctccattcagcttggtacttcgctcgcctacccccccagcgcgatgggtgctcacctgtccgaagtaccgaaccaacagactggccgcacagtcccggtggctgtccgcggacatgtcgcgatgatggctggctcgtttggcttggagctcgatccggctgtaatgaacgcggaggacaaggcggctctgccgggtctcattgctcttgctgagaaggtgaaccccattgtccttactggcgatatgtggcgtttgaaccttccagaggactcgaattggcctgctgttttgttcatcgccgaagatggtcagaaggctgtgttgtttgtcttccagctcgctccgaatgttgatcattcatggccacgcattaggttgcagggattggatgcgcaggcttcctataagattgacgggggtgtggtttactccggtggaaccttgatgaatattggtctgcaatttcctttcaaaggtgactatggcagtcaggttgtgatgttagaaaagcaatagagggcacctgcaatatgggctcgatatttatatttgagaggcaagggctgtgagcagtcacactctttggtaggatttgactcctgaacaatcgaatatcaacccatacaagattgtccaatgacgagtttaaatacccacatcaggaatattcaattcaataaacgtgttgaacgttgatgccatagacattattctgccggacgtaaaaagatccccgcttatcgataagcgcaacttttctgatctccgactctgactccgaaattctagcctctcatttattctttgcaaacaattcaacatggcagacgcagacgaggatgccgttcgcgcacctgcaactgcctcgacagaacctgatatcgacctgtccgatgagacgcaggatttccgcttcttgaaccacttaaatttgtatgaacacctctccgacatggcgaaatctccattgtcaatcgcttcaattacccattgcttacattcaatctctcgacagttttgccgattcctcccctagtatcccgcgccgcggcgaaaaagactttgagcccaacccgacagaacttcaggccgatgtactctccgcttcgcgaggggccatgcacaatgcgctctcatacccccgtcttcacggtgccaaaactcgcatcatagccttctacgcacccgacgggtatgttcctccagttcaaatcgatcgcgcgacaccgaaagctagcggagaagatggaaagagctcggagtctacccccaaacccccgaggcctttgcccaattctgccagaatatcgcctgacgcatgtgtctatgtgcccaatccgaagggccagttctttaaaacaatgggccaggcagattcgacaagtcgtatctggctgttgccagaggaagccttatatctaattgagcgaggaagtctggatatcagatggcctagcccttcggggtctacagaagacctatccgtccctatgagcttgcaggctgcatatgcgtgcttcatgggccgcggtggtctgacgctagaacggtactctgtttatactggtctcaagcgcctgggttatgcgctcgtccgagctcctggatggtgcgacgacatccagcagcaggatgcagatgctttgggttctagtgaaataacaccacccaaaatacatggccccggcctggctggtatgcttgcatcacttttcaactggattcatgaccctcactcaacggcatctacggcaactggccctataatcggcactggcattcaccgaagttacagtgagtcacacatttatctccgcgcaattgcctcagttctccttattgacaaaattcttagtggatgtataccgcaagctcgccattataccctggtacgacccagtcaccgcgcccgagagacacccctttgataccacaccacccttccgcgtcgtattccacatctacaagccctcaactcccatcaaaaagtccgcgcttcccactccagacttccgcatcgcggtcgtcagcacacgcgaccaaactaccatgcccactatgacacaacttggtgctttgctcgaaagcacgccacttgaccctccgcgtggggagaaaatggaccgtatgatgtacatgagactgcggcatggataccgcaatgtcgtcatggctgttgtcgatcagggtgtagtcagttatttgcgaattgctgattcggcgttcgggaaggagaagctttatgagaacaagggtggacctcagggtcataagcggaattatgcgaatcagaagtcgaggaaacgttgagagactcgggttatcaattcatgccttggtcgattacaagtccgttgctggagagaaggcagcaatagcctgcagcggcaatgccgtttgtgtattagaatcgtgcacatactatggatctggcccgtatatccacctcatgtcatcttgtccggtgtggatcacagcgagagctgaaaatgctctccgcggtggttggagcaattggggttcttctttcgaagatggcctacactggtcaccgcacttcaacagatagctctcgttttgagctcggtctgattacacattggagtgaagatctatatatcgttttagcattttcactagaagaatgacccaagcttatcagctggtacatattttctgggccatttaagtaccaaggaatttacatagtcggatactactcatcaagatctaaaaaccacaatatcactgaatcataaatcataacattctctgagtaacattcccccgtattcgacgagtgactggagtcttgcataccatgcaatcatctagcacatccatagcaaattacatccccaaatcacagcctgtacatctcgctcttacttctcgccccatcaaagacacaagtattatcaagcggaccatactgcctggtaatcaccttcaatgcctcctgcgcaaccaaaccccccgtcaaagaagagatattatgcaactcgccgccctcagcccgacgcagttccttaatcgcgctggcgatctgcacgcgcgcctcctgagaaaccgccgatccatccgccgcagtcagcagagctaggatccgttcggtgtggctgttccacagcccgtcgtcgtcaacagagcggtcctcttcatggccgctcgattggatctcgtccacgaccgagtcgaggatctgcgtggcgatgaatatcggaatcagggtgtccgggacgttgagctcgttgcggatggttttcagtgttgacgcgtcgctgtcgatacttatctgcgggatatcgcggccgagcacgactttgatgtgtgcggcattcttgcagaatacttcgatatctcggtctgggattgcggaagtttggcgtctgagattggattcaagctggcgcactgttgttgtcacttcttccacgtcttgtcgcgctttggccttgtatatgttttgtagtgagacgtagtctgcagactgggctttcatgtctggtagggagcctgggagggggaggacgccatgagacgcgtggaaggttttgatggccgaggcaatgacccagaaatcttgggatgatgctgacagctgttgacactggttcatgtcgaaaacctcacggatcgagctgcgtaggctgaatggcgcgattgtcttaagtacagcagcgactgcctcatcaaaattctcttcgccgccttctgggttagaagtgcgtgtctgggaccgcacaaactctctgaactcggttttctctttgtagttgctcggtgcgttgccttcgtgagactgtttccattgctccaggaagtgaagcaggagaagtatgtagggcacatggccgtgctgatggtcatccagagtgtctaggttgttcagattggctgcagcggcaacaagctcaggccagggatttagcagacgcaggtcctgggttgattctgggtccggatgtgtctcaacaatggggaattcagccggcaattgcacagagaaggtggaatagaacccaactgagtgcaggtacagcacggggatacctagctgctttgcttcctgggtcagaggtaccagggtcgagcgtctcattggaccggaaataatcaccagcttgtgctggggcaagaagtcagggtctacaagaagctcctcgatgcgctgttttataagtcagtcaatgatcatctacttttggagacatggagacatgggaaatcacaccttgagatagtaatgtccctccacgtctggattcagttctttcagcagtcggcaggtttcctctgcacgggacttgcccagggacccttcttccaggaagaaattcacgcccagatcagactcggtgactattgctgggtcgacgatagtgaaaccgccaattccaggcagtacgagattcttgagtgtctcaacgccggcaacaccggtgacaccagtgttgtattgaccgagagggccatctgagttcaccagcaggacatgagagtcctcaagtgcttgctggccagtagctgcccacaggcggagctggcgatcatatttgcgctccttggaggttggccctgtcagggcggcggggaaggcatccgtcatggtggatagtagtgcgggggaggtgatagagctttggtttgaggctcagaacattgcctgtctatcggtatgtgatgcttctcgtgttgcttacagtatttgctcttcaatcatgcaagttcctaaatgatggagcagtggatgtcgacttgttgatacgcgactatatttaggtaagcgcgtgttgtggcctgataatccaggctgacacgcagagcctcattggcattgatattgttctgacggtctgttccatagctagtttattgtatatagacaggtttctgtccgctgcgaggaagattactcccaatccatgaccaactactacgacccctagcttggagttcttagatgatgaaatgaggtcattgccagagggaaacagatatagccagcttccatgctgttaaggatgtttatttgtgatttacccttgctttgttcattgctatagtattcaatggagttttactttataaatgtaaatatattgtggcattcttgtcggtataaagagtatactattcgggtacttgatccgatgtggacttatacttcctgttgttcataccacacgactaataatactcggttatattacatataaccttgatcaatgctattgaatgcctaggcctggactttataggggaaaaaatacctgcaagtgctaaaccgcacaacctgtaacgtgacgttatagtggccataaactaaagataactatagattctatcttttgcttaattccatttcctcctctattttcatttcccctcaaaaaccaccaattccgttataaagcgcgtctataaagaggattccatgatccaaccagccctcatctcccctcttttcctctgccgtagacttaccctccccaccatccccacactacttcacagcactttgcaaagtcctcaaagactccaatccaccatgtccaccgtgtctgccgtcgaagaagccaagcgcgccgccgcaaaggtcgccgtcgaaaaacactaccccaagaatgcccgctgggtcggtatcggcagtggtacgactatcgtgtacgtcgtcgaggccatcaagaacctgggcgtcgacacctccgctacaaagtacatcccaaccggttaccagtccaagcaactgatcgtcaaagccggattaacatccgttgagtacgacaccattccactgggaacagtcctcgacgtggcgttcgatggtgcggacgaggtcgacgaggatctgaactgcatcaagggcggcggtgcatgcttgttccaggagaagatcgtcgctttgcaggctaaggagtttatctgtgttgctggtaagttttggtctggtctaatatgattttatttgcatttgcattgtagttgcgggggtatgggatgctcggaagtagagccaacactttttcttcttttttctttctttgctataaccccctactaacccacgctcgcaatctcagatcaccgcaagctccaaccccgtctccttacaaactggaaatcaatccccatcgaggttgccccgatcgccgcccaccgcgttatcctcaagctgcaggaactcggcagtatcaacccggccatccggccatccgcgagcgccaaggaaggtcccctcaagaccgatcagggtttcttcattatcgatgcccccttcaagccattgctgatcaaggctgatatcgaggctggccaggacggtagcggcaaggatggtgtgtgggaggttggtaccttggctcgcgagatcaaggagattaccggtgtgcttgaggtcggtgttttccaaggccaaaccggcccgcaagctactgctgccggtggtattggaggtcagcggcctgtcgcggcctacttcggtatggctgatgggacggtcgctgttcgcaaggccgatgtctagtggttggactagactacgtaaataatgtagatgataccaggattttcttttttgttaaaccttgggaaaaaaatgccatgattaaatttaactagtaaaagcttgcgattgtgttttggaatttctttttaattggatttcgcgtgtggtatcaacattggaaagacgcttcatttcagtatggaatcaagaaaaggccatttcgcctggacctattttgcgctcttactcttgcctttggcctccgtttcgcctaactcccgaacgtaaaccttcactgtgccttcggggacctcgtcatggccgtcttcgaatccaggactgactgcaatggccaagtgctggccactcgcactgaacgcgagagctgcgacgctatgttggtatttctgatattgacggatacggcgcttagagattccatcccagagcgcaacaacaccatcaccaccgccggacgcaaaggtgccaaagatagggtggaaagtcaatgcgttgacagggtagacgacgtccacgccatcgtcgccggtctggcggtgacatttaaaagcgtatttgcgggcctgagattcaggcgacgggtcgaaccattcgaccgcaacacgaccctcaatgctagacgaggcgtacccagcgtcatcaggcatgcaggcgacggcgcgggtcatgaacttcaagctgctctcacggcgctgccagggctcaacttcaactcgattactgcttgggtcggcgctatctgcttctgcggtgagaagggccagtgctttgaggtcgtagatgtgcaatgcgcgcgatgccatcgccacgaccagcttcgtggcagttgcggagattgagaatggcttagacgggaggggaacgataatcggcagggattcgaggtttgcgccagtatcggcttggtgaatgtgcagtgtggagtcccacgaggcggagatgacgagcttgtgctcgcggctgtataggacatggcgcacgccagcttcgtggctgctgagcacggtctgttcggaggtgttgaggtcgatcctgattaattagtatattccatggattacaagcggggtgctgatagtagcaggacccaatggaaacaactcacttcctcacgtcccaatccagtccagctgtgtagatctcattctcggtctcaccgaagcagacgtccaggacaggagcgcggtgctcgaacttctgcaatagctttccctctccaaattttccattctcatcccgcaagtcatacagatatgcgttcttatcccatgaggaaaccacgagtcgcgcggagttggggtctggggagaacttcaaggccgagatagcatctgtaggtggggaagccaaagtgaattgatctgcgacaagaaattagacatgattcaaatcaaaaagcaacgccgagaactactcacgagaagtcatcttgggcgagctgcggagttgcagaagatcaacacccaagctccccggggcccttaaccgtcttcttttctgccatcgtcaccgccctttgattccccgctctacatcgataaggaaaaaagaacgtcctgacatcatttgcttttagcacaaacacaattcctcacatcttcgtgatattgataagatgccttttgcccagctggtgattggtccgccgggcgctggcaagtccacatactgcaatggtatgcatcagttcctgggcgcaattggccggaaatgctctgtcgtcaaccttgaccccgccaacgacaagacttcatatccatgcgcgctggacgtacgtgatttagtcaggctagaggacatcatggaagaggacaagttgggtccgaacggtggtgtcttatatgctcttgaagagctcgaaaataattttgactggttggaaaacgggctgaaggagcttggtggtatgtctgacatgtcctggctgcatacatttactgactggtttgatgaattctcagaggattatattcttttcgattgtcctggtcaagttgagctatttacacatcatacttcattacgcaacatcttctacaaaatccagaagatgggcatccgggttagtggcagcaaatcttccagcggaacacaaaggaaagtcagctaaccagactcctcataacagcttatcgtcgtccacctcgtcgactcctacgccctcaccctcccctcaatgtacatatccgccctcctcctctccctccgcgccatgctccaactcgacctcccacacataaatgtcctcaccaaaatcgacaaccttgccaactacgctccactccctttcaacctagactactataccgaagtacaagacctgtcctacctactcccagaattggaaagcgagtcctcacgactttcacacgagaaattcggcaaattgaaccagactatcatcgatctggtcgaggaattcggactcgttgccttcgagacgctggccgtcgaagacaaaaagagtatgatgagtctcttgcgcgctattgaccgtgcatccgggtatgcctttggtcccgccgagggcgccaacgatactgtctggcaagtggctgttcgggagggcatgggtgtcacagacgtgcgtgatgtgcaggagcgctggatagatgccaaggatgaatacgatcggcaggaggagatggatttagaggaggaagttcgtgtgcgcaatgcggcgagccaggtcgaagcgacgggtgccgtggatggcggacctgacgaggatgacggccatgactacgacgaggagttggagaagtggaaaaaggatatgccagacagtggcgtgcgggtgcaccgcaagtaatcatcctgctccaatgacttccgagctgttttaaacgtcagatacgatacgataaatgtataatagccgaaaataaccatgcataatctaacgcaccaaaaaccggggtatctcattaaaagaaaataaatgtacagtaaaactcatcctcacacaatctcaatcatccatcccctcattctcactctcgtccataacacagtcaacgacatcagacccaccaaccaaccccccaagaacccccctctcctccgcctctttaaccctaacaatctcccgcctagccctccgaatagcctcctcctccgccttccgcatcgtccccgaaacccgaaccacgcggaacacacacccacgctcacgtcccgtccccgcgcgtttctggccattcgccggctccggaacgccggacatgtacgtaagcgccgaccagacgaggcggaaggaggcgcgcggacaccgtactatagcggtggacgttgctggcgagaggtattttactatatggtgtggttagtggttggttctatggatgggggagttggatgtgagggcctagggaatgaaaacttactcgttattccgccagcggaggcaccgcctagctttccgatcccccagtcgccgtatagctctgcgacagactcgcggatcattttcgctaggaagccttgggttagggcgtcggaggttggggagtggattgctagttgggggatgtgcggttttgatgttggggttgccggccaggtttttgggtctgggtaaagaatgtccacgaggaggtagcggtttttgaggcggaccatgacggtgttggtgtggttgtattatgttggtggtgttgacgtgggttgggttcgggttgggttaaaaggaggcgaaacttgaaaagcagtacggatagggtactggtggatcttttgagttatgcgagagctgggtatagacgtagttgctgagtagatttatgtcaaggtggattaatcttgaagctgtgaccaaaaatccactaagcctaattaggatggatagatatccatgcatataccttttcgaatatccacgtcaactcttctcgtctcgactctgctcatctcaaaactcacctatctttttcaatatggctgtttacacccgatcatcccctcttgttcaacaaatacagcaaagttctccatgggtagacatctacaccgattctgctaccagccctctccgtgtccgatcagtcacgcataatatcagttctgtctcacatgcacacccagagcctagaagatggcagaacccaggtggttgggggccaagacatatgaatgacacagctccttttactttgtgggacgacactggccggaaatatcgtttgccaactaaagaggaattccagtggattagcaagaagtttggcgacggaaagatctctctatccggttggtttatatgcattgcgaccgataacccgccgaagccggttcctcttacactaggatgcatgccggtgatgtttgtcggagtcaatcaaagctttcttgagcccttgcccaaagcaccttatcctaatccacgattaccggacccttgtcccgatctacgctggccagcaatggaatttccaacagatgcagataatatcacttttctcgaagcactggagccgttggcccatgtacgtgctgttatgtatctgccttcatggattatcattgagcttgagtatggagattcccgagtttatgaactcaagtcccttccagggattgttgctggacgcacagctctttatcaccatgcagtagctcccttccataagaagatgaagaatcttacccgaggccaacagcttgatccagctgaatcccagactagcttgagaccgttaccgcaagacactcacaattatcttcagtactcatttctttctcctggacacagaatcgaatctggctatagcctatcagactccggctatgagtcaacgacccgtgcttcgtctgctggagtaaaactccgcaattcgaggggagaagaggccctaagtatcgcttatcacggcttccccatttcctcggaggtctatcatctagatacccaccaggaaataattggagatgtgatcaatatacgacctgaactagatgtggccctcgttaaaccgacctctaccgcgtccacaaagtttaagaacacctgctattttcaagcacaaccccctaagacgttgttagaaggaaaagatatcagggcaggctcatgggccgaggttgatggcatgagttcaggcttactgaacttgctatcatatggaatgatgaaggaaaaacccgtgtctggctctccaaaaattccgttcgcacagtggcggtcattcaatctccagacatcttggggagttgtgaacgaagtgatcgctaaaggtatctgcggcgcaccgattgttagctgcgataccagcggggtgaccggcttcttccatctttttgatggaatgaactgtcttagtgctactctcgatgatttggtagctgaaggatggcaaattgcctgaatggccagagcaccgatggttaggagcactgatgctcatattcttacgagcagtatctatataggtaagcccaatccaatatttaatctagcggctcaacaatgtataatgctatgtaactcttggagaggaagctatacaatgtattgtactatctggactgctcgactggccctccacaccatctaaatgcctttctagttgcctatttgaactaatgatagtagtttttcggtactctttttatgtctttttggcatggttgaaaattgcggccggcggtagatatacccaagtagctagcggggagtcttttcccctgaacataacgaatgctatggactacgcagaaaacatctatgcggcaatggcacgttcattatttcccaaataggtctagtcatctactgcaaacgaattaaatcagatccatagcctggttgcacccttcttgagtgtcaacctgtcaacttggtcatgccacatgaacgcaggtacatcgatacacataactgctcagaaaacataagaaaagaaaatcaagggatgaaccatccaaactccaccgtcctgaacggacggactatatgccagcggacggcgttgcaaacgtcataaacaaaatcacaggttgacctcaacacggccctcggcaccacccttctgcagtgtggggaggaggtaggtgatatcatcccaagggtggcggtagagaccggtgcgcaggcgcttctgatcgaggtagtgggcaataagaccgatggagcggccgagcacgaacagaccgttgaggacacccatgcgcatgtagtcctcgcactcctctggggagaaggcaccgcagttgcggaggaggtcaacgaagcagacagccacacagccgtcgacgttgaggatcaagttgtccttcttagaggtggtgacagtctccacggcgatagcgtagtcgagcagcttggtgctggggaagtgcttcttgacaaactccttgacgagctcgacacggagatcggggttattgcgagacttgaccttgtggccaataccggggataagcttgttctccttgcgcatggtgtcgacgaagtcacgggggctcagacccttgtcaaaggccttggtgaactcctcagcggcgccatccagggcaccaccgaaacgcgatccgatggtcagcagaccggaaacgagagcgctgataaggtccttgccagcacgggtggtgatgatggtgttcatggcaccggagacggcaggaccgtggtcggcggtcagcatgagaaccatctcgaggaacttgctagcgtaggggggcaggcggcgacggaaccacaggagagacatgacaccaccaatgccaatatcctctttgaagacatcggagatgggcataccggcatagagcagctcctggccacggtcgtcggagatggtagagatgaaggcagcgggtttacggacgagaccgagctcctgggcccaggagtagtcgatgggaatcttgggcaccacgggctcgggggcggggacgatgttgcctttctggagctcacggtcatagacctccttgagaatctggggaaggtcttcgaaggtctcggggacgtgaatgccagcttcacgcatggccttgttcttggtaacggcagtctcgagatcagagttagcggaggcaccggcgtgaccgaactggacctcggtcttgaacaagctggcgcaagttccaatagcccaggcgacgatgggcttggtgatggtgccgttcttgatggcctcaatcacacggtactcctcaacaccaccgacctcaccgagcagcaccagaatcttgcactcgggctcggcctggtagcggagcaagtgatcgatgaaggtggtaccggggtaacgatcaccaccaatggcaacaccctcgaacacaccgtcggtgttctgggagataatgttgttcaattcgttggacataccaccggacttggagacgtagccgacagaacctttgcggtacaacttggaggcgacaatgttgtccatcataccaccggtgttgccgatcttgaacgcaccgggcttgataccaccaacagtggcgggaccaataatggtgatgcccttctccttggcgatgaccataatctcacgagcacgctttgatagtcgttagcaatacatccgagatcacacggggagaggcagaacttacacgctcgggcacaccctcagcaataatagcgatacagcggatctgggggtactccatcaactccagggtagaggtgtagacggagcgagaagaagcgaagttgacaacgacgtcaacgtcggggtgcttggccatggccttctcaacgtcctggtagacggggagaagggtctcactggtaccccagtacatcttgctgacgaactggccaccgaaggtgtagataatacccgctacggaaggagtcgaacgcttgcagatgaagtcgaagtcgagcatgccctgcacggctcggggttgcataccactgatcgctggtcagtctcttatttcgagattgtaggagcagaatcgcatgacttactacacgaagcatcgtgtcttgttgtggaaaaggctgtgtagggcgggcgagaggacacggctaggaggggcgaagcgggtgatgttgtcgttggcagactgcacgccgttgccagcggaaagagtaggggagggcatggtgaatctaggtctcaattagcatgccagttggattgcgaggcaattggccaatggtgcaggcaattgaaaagaaggccgtttcgatggtggatatgcaatggataagagggggaagaaaaagaagttactcactttatgcgttaaacaagccgctcgatgcgaaattagggtaaataaagaaaaggaggaaggggaggaggtaacacaggagaggatgagaaggagaagaagctgttgagaaaaatccgcggggtgagatactcggagtactcgcagatacaccgtacagctcgtcccagaccgctggactcgagcagctcaacacttggcagtcccgaaagtaccgggttcggacgataccgtacccaccggtatggtattatggtacaggtaatacgaagctatctggagtatgggggcattattggaatcctgatgcgatagtacatccatgtgtatacgtatgtatagttagttatattctaccttgaataagatagtatatatagtatatgtagtctttttcttcccatcttactgaatctgattgaatattaactcgaactatgtaccgttatgtactatctatcataagtttatccgtgtagacccgattccggaaagtcatgacatcccagtctctcgactcaacggaatcggagtcaagtgtatactccggatatacctcatagtcagtagcaccagtggcgccaccaggagtacctcgcatgtattctcaatacacgtaacattgtggtggagacctcccaacgagacctttccccaccttcgatctccgttcctcaacaggtgggaccggccgagttgtacgctgtaatctccagaacaacttttcctttttttgtgtacgccgtacactacagtacattcccacctttttccctctcactttcttacctcccagtccaattactcctctttatcctttcttcttctctcccatctcccatctcccataatctcatcacatcatgtccgccaaatctatcctcgaggccgacggcaaggccatcctcaattaccacctcactcgcgccccggtgatcaagcccactcctctccctgcctccgcaacacacaaccctcctgcccgcctcgcatcccttcacttccccgaggataaggctgttaaggatgtccttgaccaggcggaggtctccttcccttggcttctgacccccggtgctaagtttgtcgccaaacccgatcaattgatcaagcgtcggggtaagagcggtctgctcgccttgaacaagacctgggctgaggcccgggactggattgaggctcgtgccacgaaggatgtccaggttgagactgtcactggtgttctccgccaattcctggtggagcccttcgtgcctcacccccaggagactgaatactacatcaacattaactccgtccgtgaggtaagctttctccgcatttcgagcacaattgaaaggaaatggaagctaatacccaattctagggcgactggatcctcttcacccacgagggtggtgttgatgtcggtgatgtcgatgctaaggccgagaagctgttgatccccgtcaacctcaagcagtacccctccaacgaggagatcgccgcgaccctgctgagcaaggtccccaagggtgttcacaatgtcctagttgacttcatctctcgtctgtacgccgtctacgtcgactgccagtttacctaccttgagatcaaccctctggttgtcatccccaacgctgacgccacctccgccgaggttcacttcttggatttggccgccaagctcgatcagactgctgagttcgagtgtggtaccaagtgggctgttgctcgcagccccgctgccctgggctcccctgtcctcgcctcgaccagtggcaaggtcagcatcgatgctggcccgccaatggagttccccgcccccttcggtcgtgagctgaccaaggaggagaagttcatctccgacatggatgccaagaccggcgcctcgctcaagttgaccgtcctcaacgccagcggccgtgtgtggaccctggttgctggtggtggtgcttccgttgtctacgccgatgctattgcctccgctggtttcgtcagcgaactggccaactacggcgagtactctggcgccccgaccgagacccagaccttcaactacgcccgcaccgtgctggacctaatgctgcgtgcccctgcccaccccgagggcaaggtcctcttcattggtggaggtattgccaacttcaccaacgtggccagcaccttcaagggtgtcatccgcgccctccgcgaggtcgccaatctcctcaacgaacacaaggtccagatctgggtccgccgtgccggtcccaactaccaggagggcctcaagaacatcaagtctgtcggtatcgagcttggcctcgacatgcacgtctacgggcccgagatgcacgtcagcggcatcgtcccccttgccctccagggcaagaagaccgatatcaaggaattcggcgcataaacagtttaatccttattttatttgttctttgcagcgtgtgtccgttgcatcggtttgtggtataatgcatggcatgatatgacttgttttttgcgggattccgggggaggtctgcgggtgtagatgtcaccccggcgtcctattttgctgagggtatggcgttacttccgcccgggcgacaagacccggtccttctggtgccgacgtacatgattctccgttgattagatttcattttcctatgttcactcccggcggatttagatcgagtgatgtccgtcggataatatcaatgatacgcatttattgtcccagattgttccattgtagttttattatatgtcaacatgaagccagtagatcagatactgtatacgtccagctaaaacatgtccaatgcgaaagtaaacatctgaaaacacaacaataggacaaaccactgcccaaaaataccagcgtaattaatacatacagatacacctgtaattttgaataagctcacatccacgacccaaaagacaaacaagctcccgcaccagactccacacaagctctcatgcaccccggattgccagggccctcagatcccgcgatcagatccgtggataaagtagggactgtgctggagctggggaccataccgaggtgtggacgcgacttccgctgccccgagattagggcaagataagcatcggacgaacgggggctaacttgttcttatattcaaaggggattagtgcctgtggtgcttggagttgggttgggaagtgggctaatgggatataatatgcgttttcttcatgtaggttgctctttcttgtctgttgagttggtgattgtaggtggtggacggctctggcgtatcatcacttacgcgtgtaatttatgtctagctgcggccatggccggatatgagtgctggtttgaaaccattggattatcatgttggatcagttagactgatagaaggtttctttgttgtggatatgctctaagaattcgttttatattgacgggcgacgtgtgcctgagccacggtacaaagaagccaggccccaagtagaagtggcagagctctatatgtggtatattgttcgagaagaggaatcgtcactcgatatatttcaaagggctagccaggatcatgtctgtactggctacataatcagatgaacctatgtgcatagacaaggtcatttttagttgtgattcaatatatatcttgcccgatatcatataaaatgtagtatctgacacttaccacaactgactacgtgatacaattattactcaatggcgctgttcaatcaccaccagcaaccgatgcacacccagtacgctatgttgttatccgtgagatatatctcctaaccacttcgctgtgagtacccttgataacgctaacgagcagatattgaacagtctaagaaaggtcgaagttgcgaggatcaaggatattcagaagcatcccgaatatgactagattgagtgttgcattgccatttgtgacaaaacctagtctccaaagttcgaacgccattcgatcagcgactgggatcgaccgtgcatgcaagggctatgtgctgaaaatgtacgatctatacccttgaatagagaaatgtggggacaatgtgcgtcaatattacttattattactgcgtgattcaagggattatagatgagatgggaaccctactcggactattcatcgcaacgaactaggttgattgaattggtgaccggccagcatggcagtttactagggtgtaaccctccaaggcatttttagaattcgccatcactcttactcccttcggcttcttttgagagaaatagttgttaatacgtcacacaagctctcggcctcgacggaatggggtggctttctccaacctagaccctgaatatataacacactgtccctggccgtagtgaacacgaatggatcaatacagagaatataattggatactcgtctatctatgagtctgagccaagtcagttggatatgtagatcaattgggtcagccagccaccacgattgctttccaaatgtggttagtctatagatggtcttgctatctggtttcgatcctagaaatgttagaagtgtaggagtcggcaattccttatctaagaaagaaaatagaagatagtacgacataaatagcaaagatccaggaacatcgataaagtattatagacactagacattgcccgaggaattagggcccaccgtggatctactctccgcgcgaacactccgattcaccaatcagataatctcatgcacagatcctagtcccaataaagcccttaaatgaaaccgaaagggggaaaaaaataacttcacttttctttaaaccccatccgccatggaccggtatcaatcaaacggacgactgctcgctttcttcgtcctccagggtctcattccctcggttgtcctaatcacaacacctaaacggtccgctatacgttatctgtctataccatgtatgatatggatcgtgttgcatgcgatgtacccaattcagggaagggggttcacatcgacccatctcctcgcaagttgtgcaacattcgtcttgacagcactagatcttctactgatcaacccacaagccgggcgcgacttcgtcgacgcaaatggaaacatcaagagctttatacctcgtctagtcgaggctgtccggttaatcacattcacgcgggctgttaatacaccccgacaagtgaagaacgtcccgcccttcccggcatactacaccaagagagatcccaaggtgatcccacgaggtcgcttcttggttagagaaactgctattgctgtctggcagtttctagttctagatatatgtactggtctgatcttgaaacaagccatgaatgaccaagacgaaggaaagacaagttcttccggtatcctgggactagagtggataacaaagactcttattcaagttgccattgcttggctcgttgtgtgtcgtatcctgatcagcttctactaccgcgtcgcttcgatcatctttgtcggcctgggggattctcctttgaacagtccgccgattattggcagaacggcggatgtatatacattgcggaatttctgggggtgagtcgctcttatgcttattcatttgattggatcaatttctcatgcttctcaaagaaaattctggcatcaaatgctacgactgcccctcacgtcgactagcaatttcctagcgcgggatgtgctccgtctgcccagatcgtcgcttgtggagcgatacaccaacgtgtttatcgtgttctttttctctggtttgatccacgtcgtactcgacagtctgcgggatgtttcaccgcgggatcctgcgactatgtcatttttcctctctttcgttatcggctatataattgaagacggtgtccaggctctctggaaacgaacacgcgggtcccgggacaatatcggcttgccgacgtggtggcagaagactattggctattgttgggtcctgacatggctgggggttacgtctccttggtatttcaggacgaagatgttaaagccggaacagcatatggtttgggttcctttcagcgttgctgggctcattagtcctcttttattgaatagtatagtcattggcggtggtcttgtgttgaagttcgtatttgagggagagatttgaaaggagagagtgtggaatatactggatttcgaagtttctccagctagatctccccggggaatagcgaagcacgacaatgttgtacgtagagaatatatgacaaaaaaacccatcgtacgctgatcaagagatcaactgatactaacgtccgatctttgagactagtacctctaggcaataataataccctgcctagaatatctacgaaggaaatgaattagatcaaagaaagcaaactgttctgactgcgaaacgtaggtggggctctgttgagcttctgctctacataaatgatgcaacatcccctaggcatgagaataataacctcaacacacgtgcggaaaacattagcctcaactgtcattgcgaagcagaaaaaagaaaacacctcagaaacaagaatcaagtccagggtggcatagcttgtccggcagcgtacttttggctcgcttgttgaatcatccgggcaatcatctgatcagcgggatctgttcgtccatagatttgaaacgccacttgcagtttctccagccatgtatcctgggctagagccaaatcagcgatttcgtagttgtattctgactggcaccagaacaccggtgtcaccgctccttgctcgactaccttgacggcccaatcatctaacaatccttcctcttcgagaaagacaaccatcaggaggtgaaggaccattcgagacataagcggtatgttgccggtttccgcagcagctttgagcttggggtcgacaatcagcgttgactgtgagctttgtctttggccgtccaggtccactgctcacgtaatgtagagtattccgcgaatcaatcgtcgtcgcaggtcgctgagtccttggaacggagttccaggcagacacgctttgcaggagcacacaaaccccagggattcatgacgctcatgtctggtttgagctttgagatctgggaagtaacagaagtaaatttcctcgccagcctcgatttttttggtggcaagaagttcgataaacggccttgggtcacttggaaccctcgcgttgggtatacacgaatgattgaaccgcgagccaagggtataaaaccctatagacttaagggcactggtaaaatagttttctgacaaagtctcaagcaaacctttaggttcctccgactcattgttttgaattagtagagattgtaccagctccgtgggcgagagttccataacggccctaaaaacatccaatcctgtgatatcaacagaggacttctgaatcacgaaaagggccttttcttttaagatcagggatcctcgttcaatgcgttttgtggcgaaagcaccccatcctttgcctggagagggcttcagctcgaatggtgcatcgtcagggtttgagcctgcgataagctaaagcggatagcaagttagaaacactctctagcaaatgaacagggcaacgtacgacgatttgcagacatggtgttgtgtggtccggtacgctgatggtgatggaggaaaggaaaggaatgagtgtgggattgcagacctggataggccctactacctaggtcgagcatataagtctgtttgctttcaacaaatgctctttgtttgtcaaacatcctagaaccaactaacgaggagaaattaacaatggttatttttgattacgatacttgaaacgaaagctgtttattgtcatgcaagtactatgtaggtgaaaataagggcctttactttctgaccatgaactgaatcatatctagctcgaagactaaggtcctggtcgaagaccggtagaaataactgctccatattcatataaatacctcaaccaacagataaacgatcaacgcccaaaccgctgcgtgatagcatcaccaggaggcaactccgaggagaaagtcggagtccgagaaattcgtggaagtcgagtccgatgttggggagcgggatctcgacctttgcctagtcagaagcacattagccggcatgtcttggagaccttggttcaacacatactatttcgcccatcccagtctggccgagcagggggaggcattggggctccgcgaggtgtcctcttccttgctcttttggaactaccagtgccgctccgttgattccgataaagctgctcgactccatctgggttgacgggaaatgtgggagtcttgggatgtcgtataatcgggacagaaggcaacgttgaggtattggacagaggaatggaggcagaggcacgttcaagagcagaatcagggacaggagcattgagcgatgagagagcttgggagactgtgtccgaggctgcggtttgcatccgggaccgcatggcacgagctttgaggaggttgtagagattggtcatttgagcgagtttattgttcttgtcgcggtacatatcattcaattcctgattttgcttttggaggtcttcttgggatgattgcatgtctgtagtacagatgttagtcagagctccagttaagagtggactcaattggaccgaccagataacttgttctgcagtgacatgatctctgtgttggcattgtgaatgaccttgtccatctgcgtgttcaggttggtgtacttctccgtcagcgtcttcgctcggtattcctggtagaagctgctcgagtcagccttagacaattccacggtacagttttataccgaggaagtgagacatacatctcctgtgtgctttggtatgcccaaaatgcaagtgcgcgaccagcacattccatgattgtgttcggatctaacccactcaacacgcttgttttgtagtcctccgtcggattcaagattgtcgaaacagcgtcatccggattaagaagtgccgtttgacacgcaggacagagccgattgctagtggttggacgagagagtccgaggctctctgcgcatccatgacagaatatgtgtctgaaatcgtcagtcttccgcctaagctgatccacgagagagttacttacgagcaggttgtcaccactgctttctctttcaattctgctcggcatttgagggaattgcatcttaaagaaaagtccatggtgtcgttgcagatgggatgcggttggagagcataaccctggaagaagtgaaggtcacgagttagcattggtagatgttagtttagtcaaccccaaaggaaatcttcaatagaacaacaacttggacagagaacatttggtatttgtctattaaaatgattattttcataaatttccgcgggctagaaaaagaatgtatttccctgagcatcgcgccgtgttgaagtcatcttctcttcaaactctttcccgggctcatactcatgccacagactagctgggtagatatgcttgtttttctcataccaccgtcgatctacgaccttggtttctgagaaatccttgtctgcaccctctagttgatcgtcactaggtcgagacagcggatcgtccgtagaattggtggaatcggtaatggggggtttgttggaataatcaaatagcaaaccaccagctcgagagagactgggcactcgattggcgatgaagtagtaaaactcgtaatgctgtgggaacattagactagatacttaaccaccgagaatcctgacgggtgaacttacatgtggaacgataatatcgcccttgacaagcatcaagtcgtcgacgctgactcgtgcccactctcggcgattgtctttcttcgccttggatgcaccgctggcaccacgtacgcccatctcagcaccgactttccggcaccgatccaagaacaaccaaacatggtcacccttcttaactttgacagctccagctggtatactcgttccatcgtagaagacaaatggaataagaatatcagtattcttaacagcctcttgcatgatcaagaactccttacggagagtatcgcgagcgagcgcttcagcttccaaggcagcctttgtcaaagctttgggtggagggggtgcattcgggtttgctttcatgcgtcgagtactgttctcggcgggtgttttcgaacctgaccgcgatacgcttgagtcgcgtggagttgtcgcggattcttccccggtctcatcctggtcatcaccgaatgatagtttgctttttgcgaaagccttctttttcttctttttcgggggaccgtcactgcgagaaggcgttgacctattgcgctgcgatcagctcaaagaaatgggaatgacaatcgaggctcttggcttacccgtcagttatatcgcctgcagagggagttgcgcttcttgaattaccagatgccagcagccccaaagacttgtcatgcgcctcgcgctctttcgcctctagaacatccgcgcgccgcttgcgaaattcggagagatgaacaagaccgacggtttgttccttgagcatctcctccgccgagacggtttggcctgcgaaggaccgtggagtggatgtgctactctcatcttcttctgccattttggattgcgaagataacaagctcaggtttggctactgagatgagctggtttgtgacgtctggtgctggcacgtgatcttgaatttctgtatattctacaaaatcactatattataagaagtattcacgctttcaaaacagaagaatatcaaatccttcatctgtaagctactttgcattcactgaatcttagaatccagaacattcaagcgtgtcatggtccctgtttactccctttcacatatttcacctctcacaccgctgcaaacaagacaaactcggttccatgcgcgcaaccttcgatctcgatcctctttgatacaactttctgcagcatttacccgtcaaattgaaattcagaaattatggacgaagaagaagacgacttctatgatccggtcgacgcggtgccgacaacgcaatcgctgaaccatacacaaaatgcagcttcaggccaaccgcagagcaattacatggaagaagacgatgaggtagaagaagaagatgatgatgtacgcgcttagcccacacctaccttcaatttttccttgctaattctatctgcaggatgactttaatattatcacagaggcacccgaaggcgcaccagctcccgaagcgtgagttcgctgtgattgcgcttcttgcactcactcttgctgatctttctagctctcacccgcgccatgcaagcttacgacaagaaccacaacggccgtcctctgcagactcatcggggttagcgaggtctgcgacgccatccgcgattcctcgatacgaaacagcgactccgattcccggacacccagccggggccgcaagaccctcctcagaaaaaccaggctccgcctatccagccatccacagttccaccatcgacgtcaatgcgaatcccgtccaccctatgacagggaagcctatcatgtccacggacatggatgccgacttcccatccgacgacaagccctggcgccgacctggctcagacctctctgattacttcaactacggattcgacgagttcacatgggcagggtattgtctcaagcaacaaggtgtcagacaagaagtcagcagccagaagagacagatggacgatatgcaggccttcatgggtatgggaatgcccccgatgcctagtgcgccaggtcccgttgccccagtcagtgctgcgccgcccatggctggcatgcccggtattccggatatgaaccccgatatgatgcagggtatgctggccagcatgatgtctcagggcttggacccgtccaatatggatcctatggctttcatgcagcacgctcagtcgatgatgcccggtgggggtcagcagagtcaacctggctttgggggccagccccagggtcaagggtttaaccaaggggctcagggtcaaatgggctatggcggatacgaccaacgtggaggttacgggggccgaggacgtggccgaagatggtagtttgatattgaattcgtattactgttcaccctcggaataatgggatcacacggcgtttcatgcatacaaagggaatgacaatggtactggacaatttacgaattcgagcttcttcagaagtagaggtgtaggttgggaatggatgtacagcatacaatgtagctgaaggatggcttaggcatgtcaatgaaagaaccaataacacctaaacatcaagagataaatatttcaacagaacacaagtgattatatccagagacaaccaaagaggtccaaggaaaacagggctgttcggaaagaagctcatggttaagtcttggcattctggaaatttctccagtccagatcttcttcccccggaccaattccatcttcttcccttctccatcctcatcctcaacccatcctctcacgaatctccctcaccttaacaatggtacgttgaacatcccaattgatgccagaccccgatattccctatttccttaactcccggagcatgctagcacctcaactcccaacttttccttcctccaggccgagtccggctatccgaaaacccgcgcgcgatccccaattcagtccggatgtctcattgagaaacatattcactaactcgtccccttcacagtctgtcctccgcaacatcaagtccctcgctcccctcctggaccgcgtcctggtccagcgcatcaagcccgaggccaagactgcctccggtatcttcctccccgaggctgccgtgaaggagcagaacgaggctcaggtcctcgccgttggccccggtctcctcgaccgtgacggcaagcgtctccccatgggtgtcagcgccggtgacaaggtcctcattccccaggtatgtggtgcaacaattccttcgaaatacacggaacattatatactaacgtgtctgtgctcagttcggtggtaacgccatcaaggtcggcgaggaggagtacaccctcttccgggatcacgagtatgtttcctctctctccctctcactcccttttttttgccgagaacaacaactgacaacctcatctagtatcctggccaagatcaaggagtaaattagtctccaagacgatatttttatacgatattttgtttcgccgccattcatcctccttctgtcatgtcgacaccaatccccgtttcgctgtaaaatcgcgacggggatattggaagacccctgacgtgtatcatactgacgcgacgtcacgagctcgacctctctcaacgatctcaagaacaccgaccaaggaaaaaaaaacaaaaaataatagcgaatagggatgctctcattggctgatatttgacattcggttgtttaggtatcatgtccgttgtgggctcctattttggcctgtctttctattttgcatgcatgagtttttgaagcgctggattggccttgggtcttgcatgtctttgtccactgtacttttaaattaaactgcgacttgccttctcccagtggttatgctggggtgggtagtcggtaattgcagacttgatcatctcctctccattggcatattctccaattcttcgttgccattagaatgcgtctttctaaatatcttgaaagtcaatcaacgtgcagtaaaggtgatattttgataggctaaatatgataattaatactgattctcagcacgcaacaattcgtaactgcatctccccccatcttgctaataatgaaagcccatgttcccgggcaactaatcaatgctgatctgagtaccgtacatatcctcgccggtctcattctcggtgctcgagtgcgccattgattcaatcacctccgacaccctgtacatcagctccgcgccgatagtagacccgtattccctaatcctccgcgagcgttccatatttataaacacatcgaaagccattgaatctgcgctggcattgacaattgtctcatgagagggaaaggaaggtggatattggctgaaatcacgaacgcgaatgttatccaaaatgaagcgcgccgcgaaaggattaatccccaggtcgcggagagcgacttcatagtcggactcctcgtctgtgatattttccatcatctcagcgggaaacaaatcgtatcgaagtctccccattccgaaacaccacaatacaatgtataacgagtggttcgggatcggtatcagtaacgttgtggatagttcctcgtagctgtcacaaaattcagcgagcgactggctttctcttctcagagaagcattcgcaactctgctgacgtctgccctgtcaggtttgcagatgaggataactagaagcatatatcgatgcatgaggcggaaaatcttttccctgaacggggaattaattcccgcgattccattgaaccttgtatcccttggtccatgccctggaagataccgctgggtcagttcatgcggggttgtcagaataagtccagtatcaggtgccagaaggatctctgcatcacactggtatcgggaatcagcgttctcatagtttctgtagatcaacttgggtggattagttggccacccctccatatctcgcacgactaacgggtgagtggttaggagggtggtagacaagaagaacctcgggggcgggtagaatgccgatctggtcacgatctcctgcatggcgaaggcagggctcggcgagcgagacagacccgagggtctatcattagggtctgggggactgtcacccatctgtgaagggtcgtttgagaactcgccttctccaattcttgtggaccctgacagggaaagggacgacggatcattcgacgaggtgatatatcctccatcactgcctctggttcgcataaataaggatagcgacccgaggtcaccagacactgctttgagtggtttcggtgtctttttagaatctacagaagaaataggaagtggaggcttgaaagggtcttgtctcaatcctgtggagggtgacttgtagcccaatttcatacgaaacagttccatctgagcgaggcaagactctctcttgtccatgtctgaggaaatatgtgttgccgtagtactgaggttttgctcgtaaggaggtttgaaggaaacattgttatcgtttgcattctgcgaatctcgggctagctgggtgatgatttgatcgtttgctggccgggttactgaggaactcgaacagccccttgacacgattttgccttcatgaagcgtactgagagaagcagccacgactccctcctgttcacaaggtattcctggatccgccacaggttccaaaaaagccttcgttcctttcttgcccttcaaagctctcggtacttgcgctttctggctgtcaaccctgccaacggagaatcctttttctttggtcagattgggagaaacatcagtgaaagtgggttgcgatttgttgcatgaactgacatcgacgaatggaggtgaggacgcggcgttctcaaaatcaaatgcactgaattcgctttcagtgggatgcttgtcttggttagctaggcccagcaataatcaccagtcaagtactcacctcagagttcggtacactcagaccgtgagcctcgctatcgaagtcaaaggggtcggcctcattatgagtgtaccgatcataagccccgctgtcgtagtcaatagagtcggtctcaatactgacaaactgaggcaccatccctgatgaacccattaaggggggaaatgcgtccccatcacgatgagaagtcgcactagtgatattcgggcatgcggcaggaacatggcgaggaatagtaaaaccatcagctatgtttgactgaggcaagcccgaattgtagtaattaaagatatcccgcgtgttcacaggaactacaggaacatcaggaccactaggaacaaccagacgaaccggggcagaagacgaagaagatgtagccggactctgagcgaaagcagcgtgaaactcggacgaagcgatcattctctcatcctcagttgtgaggagaataggctcgtctttgatgtcagaggtcatcacttgaggaaggatgccgcgccagatgtttcccttgacggaatcgagttggagacatccgctcagcagctctagatcctcaggcttagtttcgagcctctccattaagaggtcagtgcagaagcgttcatcgatttctttgaggcgttcctctggattttcgagctcgagaccctcaataatgggaacatgaattggcagctcacatgtctcgtctgcgtaatcaattggacaaagcttagtgtagtcctctgcgacgttgtagaatctggcgtattcaagaagagttggctggttggaagtcattttgtcgcacagaaaggagaggagaggagaggggaggggagagggaggagtgagaggtggtgacgagagaggattgtttacgggagaaagggaactgaagagttgggggagttgccctggtgagggagttgggtggtgaactgggaaggtacgggagacaacacacagtcccaactaggtaggcacgagactgagaccaaaaaccaagatacttgtctgaacaggcacatgtaatgattcaaaagagaagaaagataatatttcgcttatttcgctgattgtaatatgtcgctaagtgctatgagagaaagaacatatttcgattaccatgaaccctctgcggtccgcctagtcgttgtagttcgactggcgagacccgtccttgttgactgccggcagtccagacaaagcattggattcatcctcctgagactttccagtctcttcaagcacaggtttctcggcgtggaccgcaacacgcacagcatggcggcggtggggcgtgaagccataagaagcactgtggttggtagacctgttatcccaaagcgcgacatcgtcctggccccatgagaagcgggcatgcatctcctgcgtcgtggcgatcacatcggtgaggaagcggatgatagcgtcgctttctgcggtagggataccgacaatcttcttcacaaagccaggattgaagaatagtgagttccagccggtgactgggttcgtccgaatgagtgggtgttcggtggtgacgggttcccgacgcactggccggcctagggctcgggaatcgttggcctgcatgtcggcggagtggagagctgtgaggcctttgagatagttttgcatgtgcgaggagagcaagtcgtaggcggcgtactgcgaggaccagagggtgtcgccaccgcctcctcggggtgggccagagagaagcttgagagatgtgtaggacggtggttggatttcataggtcacgtctgagtgccataggaaactgggtgtgaagagggcacggttgtcgggggcgttgtcgccagcgtaaacgacatggacgtcctcgagacctgccttgcgaggaacagatgtggtggcgtgctatgtcttgttagtatatccactcatgaatgagctcaaagtcagatatcttaccttgtgcagcttgccccagtattcacccagttggcgttgagcttcgatatcgaagttcttctgggagcgaaaaaagacaacgcctcggtatgcaatcagccgggcgaggtcatcgcgctgtgcatcatcgagctttgagagatcaacaccatggatttcagttccaaccttagggttgtaatcaaagacagctgtggcatccctcagaaggttgcggaacttggcgtctcctcgcagtcccttgtcctcgtagggagtgtattcaagcggggcccagtggagatccgggaatgacggcaaaagatcttcgtgtgcatagttgtcgtgtcgggtgactggagtctggccgggctgatagccgaatttgttgtcaccagcgtcccgcgcaaggacaggaacggtgaacttggccacagttggggccacagttactacgggctcttccagtgatggggccatctttaacgcaatagacgatgtatggtatgtgaaattaaacgcggaagatggaaatgcggaggttgaaatgcgaaagatgaatgcggagtgataatggaagattattgagattattgatatcaaagaatggaactaagttcgaatagagagggcgaactggcttatatagaacatccaatgccaagtgagtcaaccccagataacgccattctggaacgacgacggatcttgcatggccccggagttcacggagatggcgcaatttctcaaatgaatcacctcaggcaaatacatgatggagtgcctgggtacgagataattggttcgtgatggatattgtattgcgatgagacccgctctctctcctctaagatattcaaggtaatcacgcaattttgctgacgttgaaggcgaaattggccatcttcctcaaatcaacatgggaaactgctgctcggtcgatatgtatcagctctcaccgctgtttcagaggcgagctccaaccaagtcaatatcccctgaacgcgtgttcaaaggattgaggtgttgatgtcccgtgcaggagagtggatgttgagattaggaatggcgctaaggagacgatcacgcaagagtggcgggtttttgcgacggttactcatcagcctcactggccccatgcctagttggtacaacaacatgcagctattgttagtatgctatagttcttgaatgcattggattggctaaagaattcgactttaattattaagattcaagcccaggggtctagactgtgttgtattgtcttacgatatatggctacgtgtttccgaggtcgacaatgaggtctcagactaatgagagttcggacttgacagatcaactgtgtggatgtcatgtttcgcatgctgaagatcagctccataaaaatacagatcaaagtcgctaaattctcctatctatcccagatgaagccggccatcgccaagggactgctgtccaatcgacaaatcttggacttgctccgatacattgctcagacgagtggcaacacccatgatgccagcctcaacatctgcgagaacacccgagagttcactgagggtagaccggggtgtccctgcagatccctcacgcgacttggagctcacaaagtcgctgatttgacagttgagcgtagcttcaacaccatgaagatggtcctcgatctctttgaggttgccggtatatcttgtcagaacttctttcatctccttcgagcgatgagagaagtaatcgaccaggttgacggggattccattgacgtccgtagacgcgtcaccctcaacgccgtcgggaagagcaagtgtgtttttgcgactcgaccgcatagatcgctccggaatctgttgatcctgcacagaccaccacccaccgccagtcgactggtattgtagagggagcttcagcgtatcgatggctcggaaggcaacttgggcctcggccgcatcccgtgtaacaaggctgcgcagcgcatcaatgtcacccgcatcgttctcaagcgcatgttgcatggtctccaatttgccttgtacaaattcaacgtcgttaggaattgtagccccctgcttttcgatggtcgggagcagatctccgacctcatggcacatcttcatctggttcaggatgtgcttgtcgatagcctcgatttggctacggatctcgtccgcgcagctctcaaattttgtggttggcaggagattgctaacgtcgactttcacgcccgggattactgtgctagtagcggtgctctgttgtagtggtgtagtctgtgcgggtgctggctggccgaagagagagagggtaggtttttgaggttgttgttgttgttgttgggctgtgttctggccgccaccgctgggatttattagaatatagccatgacacgagacgaggaaatggtcgggcacttacaacatgcctcctgtacctcctcctgttaatccaccaccaagcagaccacctccgagtccagcgaaggctggctttgcttgagtctgggccgtagacgcaccgccgccgaaaagagagccacctaaaccaccacccgttgttccttgagtcgtgccggtgccagcgccagcagttgatccaaacaaattgcttgccccagaaggctgtgtagtggtatttgcgcctccaaaaaggctactgccggccgcaccgctctgctgttgacctccaaacatgttggatccagtcggttgtgctggtgtggttcctgtggccgtgccgaacaagcctcctgctggtttaggtgctgtcgagctcgcagtgttcccgaagagactgctggtattagttgcgccaggagtagctgttgatgtggccgtgttgccgccactgttgatgggaggttgcggttagccttttttttttttctgtctgggactagggtgaccccagtctgcgagctgggaacaacgagggattgggagaggaaacgattcgaatcaaagcaaggggtcaggcgatagagataggtctgataggtgtaatcggagacaaagatgaatgggagcactaacaacaaagaactggtggagtttgtattgagggaaagtccacctgtggcaggcgtcgctgccttgggagcaaacataattgctaatatgacaataggtctcgaattctgaaatgagaatggaacctgtcaataggtccctcaataggaacagaccttggaagctgcgcaaatgcgatttgcggaatgcgcgaagcttctcggtactttgtttatccgacccgacctttcccagcttggaaaggctactggtttttatacttcgtttgtatggctttgttcgatacttggaaaatgcatagtaaaattggcatctcattctaaacgacattgatatgtcattcatgtgaccgccgtggacttttgatacaatcaatccatgggtgtctgacttgacctgtccattctcctttcgattctggtcttattcagagctttgccattgaatgagtcactgatcaaatgagctgcatctaaagccttcagcgaaggcagccgtccagtttaagtgacagtatttgtcattatggctgacgcgaatgccaaagagtggacgccagtatgcgtggcatcaacaagacgagaaagtgagagagagttatcagatccgtcacaactctcttcaaattcatcatcaacagtccaaatcgagccagtggcgacctctggtggtgtattcatcgatcaagataccgaattcggctatttcaagagtgcagaatggtcagactctagtaccgtgacccaggatcaacctttactgaacttgtggtgtataggacgccagacggaactactctgctgacagattcagcgaatcattctatcagaacatggatcttgtgagttggcgcatcatccctatattgattatctcactcacacagccaggccgccggatctactggaggacaagcccatgcaccagttatccccatactcaactctactctcagcggaaccgacttatgctaccgcaatctatcccttctacaaccttcaagatccatccactactctattcctctcatctgttcgtgatcatccaattcggctatcatcagccctagctcccatatcagtggcgagctactatctggtaaatccaatgacagaagcattcataactccgcactcaatgatctacccatccctgctgggtgggacccacttcctcacaggctcagatagtctcgtttgtctctttgacgtgtcccgaacgggagcacatggccctgtgacctcaatgccaaccatccccagcaaacgaaagcagattgtcggtggcggtattggcatgaagggcattgtttccgccctggctctaaaccccagtggggacggtatccttgctgcgggtactttcaccagacacgttggattgtacagctcaagtggctcgggtgagctccttgggactttcagcgtggcaaaaaccaacgcaaaccgtgatattgggggtcgtggagttacacagcttgtatggagtccctgtggcagatatctgtatgtcgccgagcgtaagagtgatggcattctggtttatgatgttcgagttacggggcaactgcttggacacttgcgcgggcgcaaggctcttacaaatcaacgcatgaaaattgatgttgttccatctggtcctgatggctctcatgagatttgggctggtggtaccgatgggtttataagggtttggaggagtccagagcactgtgcaggtgggaaggatcccgattgggagttcaaggtgcatgatggtaagtccattgacaatccccaagatgctcattgctaatgtatgacagatgccgtgacgagtacaatgtttcaccctatgggaagtgttgttgcaacctgctctgggcagcaacgtcttgtttcagatgattcctctggcgaatatattccagcggagaatcccgataacagcctcaaggtctggtcaatgccatttctgttgtcagaacccgacacaaaccatgacttagaccccgcggtttgaactgcaaaaagagaaccggtcttactcttacatctccttgctatatgcattccatcggaatccgtacagagaagcatatctagaaaccaaaaagccattaattgaatcactgcgtgaatgtaaattattttctagatagacgctctaccgcgtccatgtaacctgtattgactatgtaccaaatccatgcaatatgtactatgtactgtctcagaaacctcaggtccagtcttcagggaatccgaatgccatacttggcatatgggaagtcttccagggtggaatagagctggccaaacccatcaccaatcttcccaggggttccagaaccctgcaaacgccaggcctggagctcctccacctctttctcggcatctgacttctcatcctccttgtgcgatccggtggctccagcgagaacctcttcctcccggcccttgaactctcctaggagacccgggtgggggcaccaaacaacctgcatgccggcacgacgaccagcctcaacgcccggaaccgcatcctcaaacacgagacactcctccggtttgatctcagtcttccccttgctgcgcagctcactgttgatggtctccagcgcaagcaagtagatatcaggaagcggcttgcctcgacccttgccgatgcgcggatcatcaccaagaaccttgttatgttcagggaagagcgagaacagctctgtcagatgatcggtctttaatttgtagttgaatctgtgcgacgatgttgctagcgcgatgtacacgggctcatcggttgactgcgtcgacacaagattggacaacagagtcggcacaccggggagcggctttgcgcgtgggaagtagtgttcctgaagggctgttcgctcctcgttcagctgctgctcgccgatggggagctgggcaaagtctttgaagatcttgccggcctagatatttcgtaagtataccatacatcacgatatatagtgtgggacgaacctccggctggggtcgaccctgcatctgcgccttgattgaccagggaagcaggggtctgccgtacttttggagaattgcattcgtgactatagtgtataaatcctcggagtcaatcaacaagccgtccatgtcgaagagacatgctcggatgcggggaaggctgtcaaccaagtcaatggatgtataagtgcgaacatgattaattcactcacgcattagtggaagccatggttgtaatggtctgtttaatggtgtcagagtgggatgttgaccacgtttcgataagacgcggggaacaaacgttatcagtatcagtcccgtgattgagcccttggcaacgtctgatattctcgcccgacgacgacctgctcacaaaatgagcagttcttctaatgcgcccgaacgggacgggaaaggtgctcccgatgacgctgatgacagtggtgacgaggatgtcttccacgatgcccactttcccgccgaggaagaagccgtgagtcgtaacggtgttcaagcttatgatcggagccgcatattgacttcaatctttcttgcgatagcaactcctgaaagaagcccacgaaatcaaatccgaggcaaaccagctttttatcgcgacaagctatgaccaagccatctcctgctacgatcgagctctcgcttcctgcccgaactaccttgactacgatgtcgccataatccacagtaatattgctgcttgccatctgaaattggaagattggaaggctgcagtagactccgcaaccatctccattgaacgtctgagtaagattatcccgccgaccccaccggacgagggcaacgagtcgaaggggaaacaaatcccagaatccgaaaagaagcacacagatgcagtagttgaactatccggagatgacgaagaagccgagttgaaggaactacaacgattgcaagagcaggatgagcagcggggcaaggtgatgcgacttcgagccaaggttctcatgagacgtgccaaggcaaagacccaaatcggcggctggggtagtctgcaaggtgccgcagaggactaccaggcagtttctgcaattgagaacctttcagcagatgataaaaggtttgtccaacgggcattgagggaactccccgagcgcatcaatcaggcgcgggagaaggagatgggcgacatgatgggcaagctgaaagatgtgagtacttcttcctggataagatatgtcaaaataatagagcagtactgatctcgggcagcttggcaatggcatcttaagcccattcggtctgtcaacagacaacttcaagttcgtccaggacccgaagactggcggctataacatgaacttccaatcctgatcagctttagtcaatcagagacaatggcatcatctatttgttgtactccgggcacaggagagccctggaattaatttgtttctcggcatcatatgcataactggcaggaagccatgacggcgttctgacttttgcatatcatttatcttatttcaacaatgcatatcttgtaattaaaaaagctacagtcccatgattgtggagcacaggaacatatcatgcccagctatccaccatagtctcctttgaagccactggcttggatacgaacagttcttgccgtcatacacaaaatatgctggtctcaaaagggtctgtatttattgaccagccgggactgaattctttcaccgaaaatatgacaaatttcctctcgtttgtatacattcaggaatcatgagacatgcctagcaaggtctttgaaaatataatcatagaagtgtggttgtctttgacctcaggcgagactaaaaatatatcttgtcaagccgcatgatgaaactcccaactcatttagtcttaaaaccccagctttcgcacctgaatatactaaacaacacaacctcataaatcaccaaccatggctctcaaagtcttcaccactgaatccattggtgcgcagagaaaccacattgccatctacatcgaaaccgatccaagcgaagacagaggctggctgcaccatgtcaccggaacaatcctgaacggcatggattacacacccaggccaacccctaacccggaggtgctaccagaacatgtgccagactcaaagaaggagattggaactatcgaggaggctgatctagagaggttccgggaggaatgctgtctagcagttcctcccccgcgggcccaggtgacgctcaagggaacgcgactgtatcccgacactccgctctaccgctgtggagattggctgaaagatgtcgaggagatggctttcaggaaggggatctttaagtccctgtgatgggttagttattttgtttcatggccttctgagaaagagtatgatactaagacaacgagcagtctgcggttccatacacgccatatcagagttaggactcatatgttggtatctagatagtattgaaacgaattattcttgtctgcagttttctgtcttgtgcgaccgttgttcaagacattatatagatggggaaaatagtggatagctataactatagggaagatcggaataatctgattctttgagctacacaacttgtctaggagatgtttcttgtcagaaaacagcttcattctcttacagttctcctttcagctgtctctaatcttgtagcagaattgttgctcccgagacctcgacgtatgtctcaaaacaatgccttctcgcatatagaccggttgcttatcttgccacttccgagcactctatcccatcatcttgtctgagaaccatcatctctcaggctataagctatatcagtccaaaaagtcccaccaatcatctccccggcatacaacttctactttgaaaaagtccatccaacaagatcaaagacatccacaactgtccaccatgccattcaacgtctatatcacccgacaagatggacgctgggattgggtattctatattgagcttgacgcaatccccaaggaagtgatagtggagagtactgggtggatacactccttcaagagcgacgggaaagacgggaatcaatacacagctcgactcaatcgcacccccagggtcaaccctgcaggaaacatgatcgcaactatcgaggaagcagacttgccgaaattccatgaattatgctttgcagcgattcgtccactgccgcagaaaaagcatatgaaccgtctggtccttcgctgcatgatgccagggcgatggaagcaagagccaagggagtggtggctgttgattcgggacagggcttttgcaaaggggatattcaagcctcttgacattgagatatcagccagtcctaactgcctgtgaggacgctggggtgtggatagacaatctcttcggttggatatggactagaagtcatcaactagcgcatcttcgtcagtacctcacaattacaaatatttcatcccttggtaaactccattgtaaccatcgaccttctcactcatctggtggaacacaaactgcgccagacgcgcagcaggatatagccgcaaccctgtgggattgaggacctgcatcaatgccccgacagccccttcgtatccactgtccataacgccggcatgtatagtcactccggacctaaataatgagctgcgcacgaaaatctggcccatcacatccaaaggaacggagacagtctcgttgaattccacaaggtaggaaccctgcgcgagatctaaatatggatttgtattttccttcgaggagggaaagggtatctcttcagtcgaggccggctgtcggagtttgttatccaagtcgattaccccgggtgaggtccatttgagaacgcgcttcagtgtgaggtctacaccgcagggttgggcctgtagtgtgggatatttgacgttgcgaatgatggagcgggtaatgatagagtgcccaggaaggatcatgtttaaagtgtcagagtctggtctcggttggtcctctgtgatctttgcctctgtactcggtacatgttggagaagtctgccaatgttctggaacagggacaagacaaacagagcaaacaacaaaccaagcaaacagtcttatagccgtcctacgatgtacagcatacggtacaacatacgtcaactggttatttcgcaggtacatacatatgtacctccaggcctaggtactatctgatattatcgaaccgaggaagccaaagggccgacagagaccttggaaaccccgtgagtttaaatctcgtccaatcagagcacaatgcggggacataacaccgggccgacccagcgcgtatggagccctcaatgccgagttcaacttccgaaggtatttgtatacttctatttaacctatttggacggagtttctatctctttggaatcaacttcggtgcaatttatacaaaatgccatcaatttaccgttccccatacccagatctggatatcaaatcagttgatttggtctcctatctgttctccaatcctttcaacacgcccttggaccggcctatatacatcaatgctgtctcaggagagcaatatactctcggagatgtgatgcaacgtacacgctctctgtccaacgggcttcggcaaagtataggggtaaagcccaacgacgtcgtggcattattcagtcccaacaccatcgactaccctgtggtatgccatgcaattgtaggctccagggctatcgttgccccgaccagtgcggctttgacagcactagagcttaacgctcagctcaagaccagcggggccaggttcatcatcgtccattcgtctttgttggagactgctcaaaccgcagccaaggggacatctgtcgagaagattgtcttgatagatgaccaaacaccggccaatggccaacctacatgcaatcatctcgctagtacatttgcgcccggtgattttctcgctatcgatccagccgaggcagatcgccaacccacattcatctgcttttcatctggaacatcaggcgcagccaagggtgtcattacaacacaccagaacatcacctcgaacctccagcaatggcgctaccaaatgctagactccggtcttcccgcccagcgaccagcaagacaatccgccattgcattcctaccattcagccatatctacggcttgaatctgttcatgtgccagtgtttgatatggggcacaacagtggtcatcatgcccaagtttgacctcgatctatacctcagttgcatccagaagtaccgaccagacgagttgacagtagtgccacccattgccctgctgttggtcaaagacccaagggtctccaactacgatctaagcagcgtgcgcaagatcatgtctgccgccgcaccgcttacaatcgaattatcgtccgccctcgaagccaagttcgcggagatttccaagacagaggtattctgcacccagtcatggggtctgacagagacctcgccaatggcgacagccgtcccgaatgaccgcatggataagcgaaacacgggcgtgggctgtattgtgccgaacatgcagctccgctttgtggatcccgagacgatgaaagacgcagccgtcacatctgacgggtccacggcacccgcggagatctggtgccggggtccgaacgtggtgatgggctactacaacaacgacgaagcgacgaaagaagcattccacgtggacgagaatgggacgaggtggttccgcacgggtgatatcggcactatcgatcgagatggctatgtcagtatccaggatcgcatcaaggagatgatcaagtacaaggggctgcaggtcatccctagcgagttggagggaaagctggtcgatcaccctgacgtggaggatgcggccgtgactggaatatgggtggatgacagggccactgagctaccggtcggctttgtggttttgagtcgccatgttaaagacatggatcgggagactgtccttgatgggatacacgcgtggttgaatgagcgcattgccaaccataagcgtctccgtggggggatctatgtcttgtcgcaaattcccaagtcgcccagtggaaagattctgcggagacagttgagggattggctgaagatccaagggcctaaagctcgtctgtgattgaatacttgggacaagcatctatgccaatggcgtggtaaccgtatagatcgaagtagtaattccaaccgttcaattagaaactccggcttatttctgcgtattccaaatattgtgtcacttgacagacatacatgctacgtagatacatctatcataattaaaatccaattccaagcaaattgaatgtccaaaatatccaaaacgctaaaacgtcaaacttcgggagatttccagtctcggggcccgcgggttccgatcggaggtcatttacggacttcgacttttgagactcagacccttgttttaacttgtcattctgtcagatggaattgatcacattaaattaagctcattgcacattccacatagcttctcacattctttccttaccttggtttcggacaagggctagtcctttttcacctgcgaggtcggtacccgcattgtgattcctactctcaattacacatatacttgtcatggggttcttgacgtggcccttctcacatgagaaggaggaaaagagacccaagttcgtcgagctaaggtcgtcaaaatggtttattatgttcgtcgtggcctttgctaccgggacggacatcttcatgtacggtcttatcgtaccggtcacgccaacagcattgaaagacaaagtgggaatctcagaggatgatgtccaaagctggacatccattctccttgccctgtactcggctgctttgttagcctttgcccctgttgtcgggtacattgctgaccgagccgagtcccgtcgatggcctttgctgtttggtctcgttgcgttggccgctgcaacagccttactgtgtgtcggtaccaatatcgcgttgtggattgttggtcgcttgtttcaaggcgctgccgctgcggtggtatggacggccggcctggcactgatagtagacactatcggaaaagacgaccttggccaagccattggctatgtctccatggctatcagcatcggaacgctagctggacctcttctcggtggcgttgtctacgagaatggtggttattatgccgttttcggtcttgctttcggtttcatcgccctcgatatcatcttacgattgctgttgatcgagaaaagacatgctattaaatggcttgcgccggagatgacaccgctgtccgtgacggagaagaagtcaggggaagttttagaacatcccgtcttgccaaccaatggctctgaatcccgtgaatcacaaccgccttctcccccctcacggagcgcgttcggacgtgtcgctattttgttgagctcaccccgtctcgtcgtatccgtctggggatactttatcttgtcaatcgtcctgacctcattcgacagtgtccttccactcttcgtgcaagagacattcaagtggcagcaaagtggccagggactaatcttcatctcgctcatggtgccgcacgtcttagacccactgatggggtttgttattgacaagtaccccaaatcctgtcgctacctcgctgcaggcgcatttctcaccgtcgttcccgttctggtgcttctgcgttttgtcaaggacaactcgatgcagcacaagattctattgtgtgccctcctcgcttgtgttggggtatgctttgcggtggctatgccacctctcattgtggaggtgttcttcgctgtgaaggagaaggaagataaaactcctgatatcttcggtcgcggtggcgctatggctctggcttttgggctgtcgaatatggggttcgcgaccgggagtctgatcggcccattctttgcgggttatattcgccaggaagctggctggggtgcgatgggttgggcattggggttgatagtgggcgtatcatctctcccaatcctgttgttcgtgggtggctggatcttgaaaaagccgctcgagtcagacactgaaggccagttgatggacagcgcccctgtcccataagttggcacagccaaacaaatatatttaccctgtatatatacttaatagaagactccggcagtcgttatccgcctatcaccatcatagaccttccccagtcaaacgtatcgtatctcttgagtaaccagaaagacaggtagtttagaattgagcgagtacagcatatccgagggaagagcgccaatgtaatggagggttgcacaacaactataaactgtagccaacgtgcatctagaaatatatatcatgattgtactaggctacactatcattagactcacgtataggaaacgacgaagaattgtaggcctctcacatgggtttatgcaatatctcaggtacaatatgacatacagattagagtacctgtaccatgacgttgcttctcgtaagttgattaaacttccatcccccaactggctgcgattcacattgaccatttgtatgcaatcatcttccaaagttacggagattcctacatactctagtgtaatttcagcttcttggtgtttaaattattaccactaaatcaaaaggtgattactatagcggtgatatacttccacgtctatataaggttctgaggtacgggattatgcggctctgtttccagggttcacctgagcatatgacttccacgtacaacaagaaaacatacacactataaccagagccgtctcagagccgataatggatattgtcttcgagggctttgactatttgttcgtattcctcacaaggttcgaaccccttcaatgtgatcggtggtcggcgtttcggcgtccgtccaggtgagttcggggagcgagggaccccgacaccgactgattcaatttatgtatggtgttaaaattgtctggagacgagggaatcataggtttgtcgtgtcaaatagagtttgatctgcgaagtctgagcatcttgttgacatggaaattagaggtactagcgactgagctaggatataagactcggcgagcgtctgtacatcgtgtgttgtactgactacattcaccccttcgattgttccattctttacattctacatcgaagcaaggggatatatcaagcataaagttcgtgctgcaaccctttgccctacaaccaattgtaccaaacccctagaaaatgggaggaccctatatgcctcgaacggcctccatgggaggtcgaccaacaattcccctcgatgtcccaatatgcgccgtcttcctcgctcttttcatcatcggcgccgcctgccatatgaccctgttccgtcgcaacctcgcaagggaccacaaattcattccatcgggcgcaacattcggtttctgcatgtcgcgtattatcgcaaacatccttcgcatcgcctgggcctgtcacccgacgaacattagacttgcgattgcagcacagatcttcgttgctgccggcgtgttgctgcttttcatcttgaacttgctatacgcacagcgtatgttccgagccgtctacccagtcctcggatggtcccgaccagtatcttgggcgttcaaagcactgtatgctctcgtcgtagtaacgatcatcatggtcatcacttgtgttattcagagttcgtatactctcaactcgaacacccttcgtatcgatcgtgatatccagctctatggccagacatacttcgccatcatctcgttcctaccgcttccgcttgtcgcacttgtccttctgtctccgaatagaaagtatattgaacaggttggctatggtagctggatcgccaaagtcttcatcgtcggacttgtcggctcattgctctgccttggagcatcatttcgtgccgggacctcttggatgccacctcgtcctgtcacggacccagcctggtatcacagtagggcctgcttctatatctttaacttcactattgatattctagtcgtggccattttcttcgtcgttcgtgttgaccggcgattctgggttccaaatgggagctcggaagtgcgtcactacagacgtggtgagaataacgcgcaagtcgcacaagaggggactgctcttacggttcacgacaaacaggatatcgagacgcagagtaggtagcagcatatctcagggcctgacatgtgacatttgtgattaaggaaggtgcgatggagggtgtcgcactttaggaaggcaccgtttgtttggggtataaaagggcccctccccccatttctcttcttctcttcttcttctctcctccacatctctctagccaccatctcaccgtagcccccacgagacagcgtcggcagaggatgccgtagcacatgctgcttcatctaccacagggaccatgacattaccatatgcacgaggtccatgtaggtctgcatcaaacatcaaactgggctttctcgtggacgttcctgaagtcgtggctctcattaccacttgacgagtcccacggaatacattaggggtgtaaatcttcgtagccgagactcgaaggtagtcacggcaatgaccgacgcttccaaccttacggtttcttttttgtgtatctaacagaccgacgatgaaggttgtaccattctccattgtttccccatgccactaccccagttgcactacccgtcgtcgcgccgtcgctcagctcggcgttactgttcttcccaacaccgacgtcgcccagtctacgaattagatagactgtgacgccgaatagacagaatagcctattgtttacatgtattatctgatcaatgcttaatcgtcaggatgactgaccatgatgcatactgtcatgtgttcgtgagctgaaagagcagctttcggtgttgacatggcactcattcaaggcgcggaagatgcacacattcttctccagctattggccttagatcgtcagaactttgaactttccctcattatcctatatgactagtgctttgttaccttacccaagaaggtctacacacggccgtttgaggtcgccatggtttcaatgcgtttctgatactcgatgttctcggatgccactttttgttcatggcagaagaagctgggcccaagcagataacaagcaatgatgacaagccttgcactggcacagataaaacgtaatctccatgcagcttctaacacttgtaagtcatctactgccatccagagaggaatattgaattccagccttctatgcgtatctgagctcctaatctgttaccacctgggcagagaaaggtatttaataatctggaatagcctcccaaggttatttctatagtcttatgggcctgggtcttacaaatggtcttttattttcatgattggtatcaacaagtggccaggcatcaaaccatacagaattaaataggcgagagccatgttcgattgcaacctccattctccgccagtccaattgcctctcgcaggacaaagatgaagtctatcaaaggaaatagtcaggtgtgcgcctcgataccataggttctcccgctcgggggcaggggtcgaattgtaggctagataatgtcagtgggatatccaaatgagaaattgcaggagtgcgcacaatgtgtatttcaaatgctcgtcaatctccataatggcggcctggttgccgcagcggtaacagtaatttggtgctgtggtctggttagtgcttttggtccatcaagtcttgcgaataagaatatacctgagaaaatagtgacgacgttccgatcctgtgaccagttatatccttccatcaccaattgatgggcacgtgccacaagagtcaagccattgttgtggttgaatgcctcggaaatgtcctgtccgaatgtgtatccagcaccacggggagagattccccatccgcatcggtcatcaggatcactccagagcaaatcacacatgggaccctcgtggggaacttcttggatgcgatcaagcgaccggatgttgtcgagagtgtcaatggatggactcagtccaccgtgaagacagaaaatctggttttcgatgagagcagtaaggggaaggtagtcgaaaaggtcggtgaagtatttccacacgttggcattgccgtatttgcggagacattcgtcatagaatccgtagacctgtgtgatctgtcgggactcgtggtttccacgaagaatcgtaatacgctgcgggtaacggatcttcagggagaccaggagggtcactgtctcaactgagtagtaaccacggtcgacgtagtcacctatatcaagaaagattaaaaaacattaccccacaacgcgttgacccgaccgttatccactcacccatgaagaggtagtttgtatccggattaggaccgccaatgcggaaaagctccattaagtcatggaactgtccgtgtatgtcaccgcagactgtcactgggcatttctattcggatatatgtcagtgggctgggcgatcaggacaacctcccgaccgagaacaacataccactggctgcacattggattcctcctgcaatacctctcttgcctggacgacacatatgatcaacttgaattcatcattaccactctgtcaaaacaagggacccacccgatcgcacagccgccgcacgtcttcttctgctaattgcttgcaagtcatcaaactctcgatccagccgtccaaagtcggtatggacccagggtcgcttgttggcgacaagtggtgtggctcgggggaccgcgcagtatcgatttccatgttgttatccattgcgtcggtgtgctcaactggttgaaaaggaggggccagctggggaggggcggtctcgtgagaaaacaacgggattcgtgggtaggcgcaggtatcgtggggtctggaaaagatgtgggataattacgctccagatggaaattcaattaaaaggcaaattcccagtattgattcaagggataaggggatgggacttgggaacacgagaaagggagaagagatgagagttcgggaaggtcaagttgagtggtgaacagatgcgccacacttcagccacacaccgctttctccagcctacgtaattatcaactacaccgttgtacagaacgactagggggtttatatctttgttgatttgtgttagacatttaagaagacaatccaatgggtgtataagaagatgtcccacacaatccactcagaagctacggaggaaagacgtcgagtgggccatggagacatggctgtagcttcgtgttattcttgttaatgttgagatggatatatgccatttcggaacaaaggatcttctactttgttaaagtcatcactcactcgtcactttttagataatgtcaccaccaaatccaccaccaaacccaccaaacccaccaaatccacccccgcctcgtccattactaccgaacggtcctcgattacgaccaacaggtggttcaccaggtcctacgggatcatatcttgcacctggaggtacacgggggtcatatccatcattaccagctcctcccccgttgaagagagggtcatcaaaggtaggatgcatacccccgccacctggaccaaagccagggcccataggtccgcgcaaaggatcattaggaccaagtcctggtgggtagagatctcgttctccaatgttgtacgggcttctgccttcaagtcgtcctggatatcctcgtagaggcctattgatctcaagctcatcttcgaacccgggtggagcaaagtctggtgggttggagcggcgaggagctgccgccaagggatcatcaaatgggcgtgggcgagcaggctgtggcagggagccatctcgaagaatatccggttgtctttcttcttgtggtcttgctctggataactggcttggatcttcatacccctctttgtacaaaccgggcgcgagtttctggatgacgttgatcttgaataaaccgaccaggtcgcctagtcgagctggggagatgaaaacatctcgcagagacgcagtgagattgtctgaggaggatatagggagcgcagaggtggagatgtagtctttgatggggatgtcgaacgagctggtccggtcatcgcccaatgccaatgcgaagatcactgcgttatttcccagccgactcactttgagtaaatactgcattgaagactgcgcatgtgcgtaccgaaaggcaaatgtatcgttagtgttccattctgcggggagggaaggtgtatctgtagatgtttctagagaagttaataggagatcaccgatgcgatcggagacagacttgacatacctaaagtgtgctcttcaccaagaccgatcaatctgaaatcaactgctaccatgcatgcatggccgatcagagccacggcctcatatgatgttttgagactcggctgtctatcccccgcggactggatagctctcacggcaagatcgaggatattatcctgacgaagggcatcggctggagccatgtttgatagatattgtatattttagacgtccaatactagatggcaaagaacctggaataatgtaggagatggggcggctcgtgaatgcccaaagtgacctcacatggggctagctgccttgggggagctgtggcgtcggaacaaacatcccccgctccagctatcttccccgcttgcctgttctatttgtggccaagcggagagctgcatacgaaacatacaaccactgttattctctgaaggtaatgatttgattgatatttcccctctataacatcgacttcgggaaattcttcattgcctgccgcactcccaaatccgccaaaatctcctcagttccacccaagatggcatcaaacttgtatgtgcgatggaacatctcaatgaccttgcccattcctgactgagtgataccacgaccaccaaagatgtttgtagcgagactggcaatttcgcctgcggcttgggtacagtgtgatttgagcagtccgataggtccacccagattctttgcttgttcggcgtatgtcatgttgcacatttgataggcgatggattcaagccatgcctggttagattcggctagggagatcatgcgggcgagcctgtcgggagttagaagagggatattaagagcagattgtaagaaactcacttctgacgaataactggctgttcaatcaacttcttaccaaagacgatgcgttgattggaccatttcattgtttcttcgacaaccaccattgacatgcggaccacggcagctaccatcataaagcgctcgtggttgaagttgctcatgataacgaggaaacctttgtgctcctcacccaggaggttctgaaccggaaccttgacattctcatattgcacgaaagcagtaccagcggcagtcgaatatgaggtcttgatttgctttgtctccacaccttcgccgcgaggaatcaagagcacggagaatcccttctcggtacggcaggcagtgacaaagtagtcggcgaacataccgtttgtaatccatttcctagacattgtcagcgcaaatccaattaaacaacaaacgtgatccgactgactttgttccgttgacaatataatgtttcccatcaggagtcttctctgcagtcgtcttcagacccgccacgtcgctaccagcaaaggcctccgtgacagccaaacacatctttttctggccggacaagacctcgccattgatgcgctccttgagtacaggatcgtgcagccattgctggacagctgtcaaactaatagccatgcctgccatatttccatcctggaagcctctcgcattggcacggaccaactcctgtgttacaatcatatcgtggagataatcaaactcctttccatccacaactccaccgagcaaggtgcggccatgcagatgctttccagggcccagtcgcatagccagaaggttcgtctcggccatgcgattgatgagctcctggctgatgtaggtgccatcccgctccttctcttgcgcttctggcgttacatatttatctgtgaactcccggacggccttttgcaagcgtcggtggctttccttgtagtatggggacttgaactggggtcgcagccacaggggttctgcgtagggcacggggctcaaacctccagggacgggcacgatgacctcgggcttttcgccttcgatgacaccaatgcaaagctggtcacggtatttctccagcacctcctggcggtgcagattgtagaaatcggatgttgcgtcctggccagcaatctgagcaagtacaacagcaccaccgggatgggcgtcgacaaaatcggttagatcatagacttggtggtcgatgatacaccagagggaatcctcggtgttgtgcttcgcgacttccgcgcgcgtcagggtttctgatgacatgttttagtctggggatctggagaaaggggagaagaatggggggcaccagtagtaaatacccccagattatgagtcgccaatcatgcaactgcagtttcaatttgagccgaggcccgaaaatataatgtggaacctttggctgcaacctcaacaccgaccaacgaggacctcggaacaggactggcccaccatacaacgtataattgatgttttggccaatagcgggctgttaaattataatcgccaagagtgtctatatcgttttacgacccacccgtgatcggcacgtgtcagtttgagcttcaactagctctagagagaaggggcagtacagcatgagatttatattgtttcggatatggggttcaaaagagtagacttctttctatgtacttatgtagaggctatggtgacattggtctttgtttctaagatctatctcaaatcgacagtagtgtattcatgggcacatcttgacaaatggtatctttaaacgccgtcaatgatcccccttcgaacgattattcttgagatctttcatcgcctgctccattaaccacgcgcaaacaggctgcgcatcgcttccgacccgccaactgcctagcacaacgtcgtgctgttcaagcacttcgcttgcgcgagcccaacgacgtcgccaaagctcctcgcgcttatttggcaggggcgcaggcggcacacccgttccattcggccctggtctccctgattggttggatggagactttgcggatcctgagaagttgagtcggtcgcttgcatattggaacccttggtatgcagcctgggcggctgccgctgggtatgattgaatgccagtcgcaggagccgcaggacgagccggcgtacttagtgctgttgatgcaattgatggggttgatggggttgatgcacccggatctaaactggttgttgaagacccggtgttcgtgcgacgcggaggaggcggtggtggcttgacgcgtgcaggttgcgattgactctgggtacctacagaattatcatcaaggcttttgagtccggaagaaggaagttcattcgttgatgtcccagcgctactctcagagtttgaaggcgagggatccaggtcaatcaatgagcctgtctttggcactgcacgtctgggtggcgtagggggaactggtctgcgcttgggaacctcttgtgctggtgtcgacatcgtgtcattttctggcacatcggaaggtgtagcgacgttgcgcagagaggatggtctggaacccttcgccaaatcagctggtgtagaaaccatgcgcaatgcagacggtttgatcggtttcgctgggcgtggccgtgaagtggcggggcgggtaagnnnnnnnnnnnnnnnnnnnnnnnnnnnnnnnnnnnnnnnnnnnnnnnnnnnnnnnnnnnnnnnnnnnnnnnnnnnnnnnnnnnnnnnnnnnnnnnnnnnnnnnnnnnnnnnnnnnnnnnnnnnnnnnnnnnnnnnnnnnnnnnnnnnnnnnnnnnnnnnnnnnnnnnnnnnnnnnngggggggggggggggggggggggcgggcccccgccccggcggtggttgatcgtctatgatgagatctgtgagatcaatcaggtcctcaaggtcaagatcttttggatctgtatcatgatgggctacgggcactgcagggtcagccgtgccacctcgaggcgggagcgctggtctgttggaagcggcatccgagtggtccactacaggtggtgaactgcgactgcgcttagacgggtcaagatgggggacggatttgtcgaagaacttctgcgtttctggagtcgtaacatcacgaatgaagacacccaggatctggccaggatatgccaagacaatctccgtgtaaacctccagatcagcttcaccactgtcaccaacaagaatgaattttcgttctgggaagtcgcgcagaatttgttccaatgatccccgtttcctctccgctgtgggctcaaagattccttgaagcatacccgaatactgtttgagatggaaggagcccggaggcaatccgaccatcttgaagtaccgctccaggaggggatacaattgccagggagcattcgacacatagtgaatttgcacgccctcactggccagtttgcaataccagtcgctaactccgtcgattttaagttcattcaattcacggacgaaggtgttgcggaacatctctttcgctccactggaaatggccgagtgcttaacggtatcatcaatgtcactgatcaaactgattccaaccggatcaatgacatcaatcggtcttgcgacagacaggtcctcagatgccaacacacgaatatgagttggcgcaaagggcagtgtagcgcgaagagtaaaatggcctgattcatccgtcatgatatttcgagacttgctttcggtgtcgttgaagaagaacactgtcaccggcatgctcccaacgggattcgacaagaatggacgaagtctttccattagatgggcatttgctatagataattcatccttactcaatggtgcagtgggtcggcgtgtttgttccacattcgagcctttccaagccgggtctgcttctctctcggccttggcgactagcgattgaatctccttgtcgatgtattcgtcatctcccttcccagaaatcttgtcgttactttcattatttgcagttccagacggtgcagagatcccgctcagcttcctagccagggcaatcattaatcggtgctttcggctcatctgccctcgactaggagagtaaatccagccacgcacgtcaacggccacaactgcctcttcattctccgttggatcccaagtaggcgaggagagatcgtcgtcctcgtgggttgcaccccggtaatcatcgatagtttctgaccacgactcacgtcgcggacgtgtgttggtaccggtgctcgtgctcttcttcttctctggcaatcgcctagcataactggggaataccaccatctcctcatcgcctgaccgtgaaatctgtacgtccgggaatgcaccgggtgtatcgtagtagtcctcatcgtattcactcctctgcccggaccattgtgcggtataggtctggcgtagctcatttgccgctttgagatatccgtagaccttcttccgacggctaccgggggcaccagcaccatcaccaccccctggcgcccatgttgatgaaagtccagactgcgacatcgggtctatcgttgtgtccttcggtccgtagcggggttctcggatcgacttcgggtatcttgcagctaggctgctactagctactgtagtaggtttcgatagccttgactgtcgttgggtcccgagaagataattcacaagacgtgcgccaaatttgctatcgcgtgtggcgagtcgcgcttgtcgctgaaggatcgctcggtagattcgcgattgggcccggtgtcggagcgcgggcagggtttcgtaccggatgccccagagacgggattgagtgcgtctggttgcgcgtgcaccaattatcagatcaagtatatgcgaaagtctgctgggtctaggttcgcgggggaaggaacgaaagaggctggtaggtggacgtctaaagagagagggcctcgaccgcaagattggccaacggaaacgtgatttaggcgccagggtcccgggtggtatgatgtacaagcagggtaaagtattccgcgacacaaaaagccaagtcgagtaaggctgtagaaagttgattacctgcggggaagagatcggccatgacgatgactactcgggtgcgctcaccgcgttgcaaccgaagattccagtttgatatttgagactcttgttcttttgtgttgaaataactacatttagacataatcatctaatatttaagattctatccatacatccacaggtatttgaaaggaagcagatacgggaattttgcattgatgaaatgtatcctgatttataatctagccatgaaacctctcgctgtttcagatatagtgagaaaaatcgtatattgtacactaatatatgagaactacctaggtatcaagtgccagttatgcactgtcctcggcgtagttcaccttctttgcacgtgaacttcgagaaggtatcgaacgagcactgtccagttccaccgaaacctccccagtttcttcggactctggggtagactcagtcaacgaagctctgcgtttgcgagacctgctcggccgaggtgtgcgtttcgtctccctgaccggttttttgactggcgtttctatcttgacgggtatatctaggggagcatcgtctgtgacagactcattcttaccctttttggcggcgctttttttaggacttggtgcagccttaggcttcacgattttcttcgccggtcggagccattcttccatgccctcaggccaatagaccctgccatccggcccacccatcccgacttcttcgtctgggatggcgcgaggcggtggtattgagccttgtaggtccacgaatgccccgttcttcttggaatttttgggtggtttgaatggttggttttcgtcaaggcgtatgaagggtattatttcgttcacaagatcgtagccggggagtttgaagtttctcatcaactcaaatacggcttgttctttgtccttggcctcaatcatcaggtccatggtaggcgcacaaggaggtaaagtagtaacgcgggcactgtgtttgcgtcgttggcgccgagtgatggcgggtgaagtttgttcggaatagtgcatcttttgagtgatattcttccgagaccatgttgctgatatacgctcatagaggggtatgatatcctcggttccctctcggagctcattggcgtcaaaaatgatattatggtggtggtagtcgaggacaagagggatattgagctcctcgcaaataggcagtagatcgtgaacggaccagctcacgtcgtcattctccagaactaatcgattcttgatgtcttgcgacaacatagcgtagttctctcggaaccgatccagtgtagcagccttatcaccaaacactccacccatatgaaggatcatgactgcatcgcggtcctgctgtggaggaagtttgagtagccggagcatttccgagtgatactcgagatcgcgaacggaattctcgatgacttcttttctcggtgatccaaattgagtaaattggccagggtgaaccgaaacccggtgtccaagttctccaaccacacgtcctacttctgccagcacctccgaggcgaatggcgccagcttataaccatattccttatgactggcaaatgggaacatctcactgctgagtcgcatgaacttaatgccatacttgtcgttccaacggatgattttgaccaaatcgcgtgcattcgccaggcctagcccctcaacgaaagcttgtccgcgtgcaacatcggctggctgatcgcgatctgggcgatttttggtcgggtgtgtgggctggtcgggatcttggagcgggtgtcgattttcgattatagaggcgattcgacatgttcgagaacagaatacggacggtgttgaatagcgaaggtacgtatttagacaagcctgtgcaagtcagaacccataatcgtcagcgcgagtgtatcgtgcccagcacagcaaaactcacatatcctaatcgacctttccatggcaggggaaggtagctgctgttcaccggaggtggtcggccgagtgcctcttttagctcttccgcatcaacggggacatcttcgtctgattctgggtccaatgaagcctctacctgaccagcaggtaatggtatatctccattgaggatatccgcaggcttcatctccggcccaggcgtctcagttgccccgaccatatcttctggatccagatagcttggttgtcggccaagatcctgtgaatacgcacgcgatgatgcgagcctcgacgtgtttaagggatgcgcaacacttttaaatgagaaatacgagaagcgcagggcacagtgggctgcatgatgggcattatgaattggggcgagcgatctggttctcgccacaggaacagggattctcaatgacgtatgtcgaccctgttggctagcttccaagggatgaacacggatagacagaccctgcagcagccgaggaaaagaccgacacattcagcggacttttggaagtagctcaaggagtgttggggtttgaaggaggtcgtaagggcgggatgttccatgacgcgccaatccacgcgactcaccgcaccaattcacccaacctcatcaaccttgaaaccacaatttgacatgatcatatctgcaatttcgaggcctggaaattgtctgcaatctacgtgataatatacaatagtgcatgaacccattgatgcctcaggcctcatacgtcagcgcacctgtcaggcaaaagtacccgacgcacgaaccgcctcaactgcagaaagcgggacaactagccgaagaaacaatgcctagtggctgcacatgtgctctgctactatttatattggacacatcacaatgccattgtctgtgaaaccttgattgtataacagtccgttagcctgcaggggctatgtttgcagtacgttgtacagcaggcgcaaggattgctgcttttgatatatttccgccatactatatctacaatgtccttggtaaggagcccttccatacccgattgatttgtaggatgtcggcatctgttaactcggaccacccattaggatcctttcggtgctactaaatttaaagatacagatcatttcctcaaaaggatacacagacatggctgggccgtgttctgaaaattggcgtaggtctacatgtgggaaatattattcaactgatgtaggagagcagaggctagagacgaataggctcagacccttcgagcaaattagcctcagacaatgcgcggctcgaaccgaagttgatttcattcccaagcccaaagatgagaatgaagacaatttatgtcacggcatatgcttatcagccaacgtctatgggtacatacgtatgtaggatgatatgtacgtactttatgccggatgatcaaggtatgtgcatagacaatgaagttctatgttgggtttgccgcataactgttccggtgctagatccaatgagaccttatgggtaccaatcagcgtgaactctatgacaatagtctgcatatgtgggtatactaaatgagtacgggggagctgataggggaattctccgggatataacaacgcagcaagttgcacggtggtatgattggagctagggccaagacgaggtggggttaagatgggtactgacagttatttcgaacttttgtacggactaactcgtattaacctttagttataatcgcctgttgttcgcaatcatgttctttccttaatcttccgaggccaaagctcttttttacctcacagaagaactattgccgcaatgattctcaaggttgttgaaccgaaaccggttcccccagagccaatcgctatatgtggaatgtctgtacgtctccctggaggcctacacacaccccaacagctatgggacttcctggttgccaaaggagatgcccgtggccaagtgccgaagtccagatataatgtctccacatactactccgagacccagaaaccgggcagcgtcaagaccgagtatggatacttcctggatgaaagcattgacattgcttctgtggatacatccttcttcacaatgggcaagttggaggtggagcgcatggatccacagcaacggcagatgctggaagttgccagggagtgtatggaagatgccggcgaaaccaactggaaaggacgaccgattgggtgctacatgggtagctttggtgaagactggcttgaaatctgtgtcaaagaaacccaacaatacggccagcatcgagtgagcggatatggagacttcatgctgcctaaccgagtctcatatgagatggacctgacggggccgaggttagttgttccatatttttttttatcttggaatagaatgcaattgctaagtggaaaaaaataataaagcatggtcgtacgtactggctgctcagcaggtattgttgcactgcatgaagcatgtctggcaatttccaggggcgattgcgagagcgctatagttggcggtgcgaatttgataatggcaccaggcatgacagctgccatgagtgagcaaggcgtaatttcaccggatgggtcttgcaagagcttctctgccgatgccaatggttatgcgcgaggagagggaatctctgctatcttcatcaagcccctggctgatgccctccgggatggaaatccagttcgagcggttatccgttcgacatcatccaacagtgacggaaggggtgctggaatcggcgcacatgttcccaacgatgtttcgcacgaggccatgatcaggcgtgcatatgaggtggcaggtattacagattactcccagaccgcatttttcgagtgtcatggtactggcacccaagttggagatcccatcgaaacccgagcagtgggtcgggtttttggtccttctggtggtatcctcattgggtctgtcaaacccaatcttggtcacgctgaaggagcttcgggaattacatccctgatcaagtcggtactagccctggaaaatcggaccattcctccaaatatcaagtttaaggagcgcaaccccaacatccagtgggatgaatatgggctcgctgttcccacagacccgatgccatggcctgaggccaggagcgagcgaattagtgtgaactcttttggaattggaggtaccaacgctcacgttattgtcgattcagctcggagctttggtgtctcccccgttgccacacggcataccatttcgccccagctgcttgtttattccgcaaacaatgccgagtcactaaaacaaatgatttcccactacacatcctatgttcagaagaacccagccagagttgccgatctggcgttcactctagctaataaaagggagcatctgcctcatcgggcattctctgtgcaaagcccattgggtccgctcacgacttcggcaccctcgaaaactggggagacaccaaatatcgtcatggttttcacgggccagggcgctcagtggccacaaatgggtgcctctatgatccacaacgacgtctatcccgcatttaagaagagcattcaaaatcttgactcacatttgcaaaccctcacagatgctccagactggagcattgaagaagagctcttgaaggaccccgataccagcagactcagctcgtctgaattatcccagcctctctgtacagcaatccaggtggctctgatcgatacttttgcttccgttggagttcaacctgctgctgtcgtgggtcattccagcggcgaaatagctgctgcatacgctgccggtgctatcacagccaccgaagcaatcacgattgcattctatcgaggtcaggtcaccaaggcgcaaaccaggcctgggtccatggcagctataggcatgggagctgaggacatccaggaatatctacaggacggtgtcgttgttgcttgcgaaaactcacctaagagtgttaccctcgctggtgatacacatgctattgaaaaggtagttgccatcattaaggaggcccatcctgatgtcctggctagacagttgaaagtcgacaaggcgtaccactctcatcatatggctgagataggtgacgagtaccatgctttgattgaacatgaaatatccaccaaggctccaaataagttattcttcagcagtgtcgagaacgaactactcacggaagcccaacatctcggccctaaatactggcagatgaaccttcagtctccggtcctcttccgctcggctgtatcgtctataattaagcaccagatttcgaagaatatggtgctgcttgaagttggaccgcactccgctcttgcgggccccttgcgacagatccagagtcatctttccacttcttctccttatatttctacgtttgttcgcaaccaggatagtacggaatctttcctgactgccattggccaactgcatgttctcaatgctgtcccagcgttggataaggtcatcagcacgggctctactctcccagatcttccaagatacccatgggatcactcaaagaaattctggtatgagtctcggttgagcaaggagtggaggcatcgcgagcacaaatatcacgatcttttgggtgtccgggtaacagagagtcctgacttccatcctctgttccgaaatctctttcacttggacaacgccccgtggattcgcgaccacaaggttggtgatgatattgtattccccttcgctggctatgctgcgatgattggcgaggctgtgagacaggttaccggagttcgcgaggcattcaaactgcgcaacgtcattgtcagcactgcccttgtcttgaatgagggcccaccagttgagatcatgacaacattacatcgccatagattgactgattccctggacagtgagtggtgggaatttgccatcacttctcacaacggagcgaattggatcaagcattgctcaggcgaggtcagatcgcttaacgaataccttgaagatgtagacaagaaagcccctcttgtgcgcaaggttgaaacacgccgttgctatcattctatggccatgtctggtctgaattttgggccatcatttcaacgtcttgaccatgtccgctcagacactgtttcgcagagcgcgacgtctgaacttgttgcgaaagatactgatggggataactatcatttgcaccccacagtcatcgatgcctcacttcagctgctcagtgtcgctgcttccaaaggatatgccgaaccgataaccaacataatggttcctactcacattcaagagatctccatctaccgctgttatgagaatgtccacgtccaagcttccgcatcttacaccccgaacggctctatcattgggagtggccagtgtattactgcaggggggaaagttgctttacgcagttctggaattaaactctctgttctcgatcatcaggaccctgaaaagggggaaccccccattggctgtgcagaatgggctccccatatcgacttcctggatgtcaacactctcatcaagccattgattgaccgcagtgattacatgcccgctttgacagagctatctcatctgtgtatgatttacacacagcgtgtgattgcggatctggatactccaatcagccacatgtacaagtatcgatcatggattgatcaacacctgttgtctgtggatctgcaaagtctccaaatccttgacaatattgccattaaacagcgagtgaaagaactcgttgaccaaatttcccaaactaatggcgcccatcttgctgttggtattgaagtgattttcaataacgtccaacagattttcaccggggaggctgaggctctggatctccttctgaccgatgacatattggccaacgtctacaacgctatggatcagtgtgatatttccgaattcatcaggaacttaactcacactaagcctaatctgcgtatcctcgaaataggtgccggaaccggtgggtctacagctaatatcctgaagctgttgacccctgggagtaggaccctatacatgaactacaccttcacggatatctcatctggcttctttgttgctgcaaaggatcgatttgccagttacccaaacatcgaatacgctactctcgacattagtaaggatccctccgatcaggggttcgatgatcgcaaatacgacctaattctggcgaccaatgtcatccacgccacagcatccttgaacgacagtttaagcaacattcataaacttctttctccgaccggatggctcctgctccacgaattgacacccatatccaaatggatcaactatatctttggaaccctggccggttggtggtacggcgaggttgatggccggtcgggcgagccgtacataggcattgaacgctgggcaaaggaactcaaggccgctggatttcgcactcctgatgctgcagttctggattcgaaccaaccacatcagttgaacgccatgatcgtggcgagaccggaggttgacatcgcacctaagaaatgcgtcactgtcttgaccctctctaaatcaatgtccgtaggtcctttgcttcaggctctggataacaggggatactccgttcatcattctcggtttgacgaagagcccctgcctgaaggacaagatgtgattgccttgcttgatgaagaagccccattcttcgaaggcatggataaccaacgctttgactctttcaagaaattggcacacagcctagatcaacgtggtgttctgtgggtgactcgttcatcacaagcccaatgtcgggacccgagatttgcccagatcaacggcgtagcgaggacgattcgcaatgaattgcgtgtcgactttgctacttgcgaggttgacgatcttgatgtctcttttgagaaactcatcgacgtatatgagaagttccaagtccgccaggaggatgagaccctcaagcctgaatttgaatacgctatcgtggacaatacggtacaagttgggcggtatcatcctttctcggcgcaaaatggacaagaggcgctggcttcaaatagtagcatcgcccttcgaacaagtaaaccaggccgcttggcttcgttacactgggctcatggggatatcaaacctctggagggagatgaggtggaaatcgacacttacgcaatcggtttgaatttcaaggtaagttcgaaggtaacaagtggacctaataacacatactgatatgaaacaggatgtcttatgtgccatgggtattgtcgaagccaaagaaaatgaatttggccatgaaggcgcgggcatagtccgccgcactggccccgatgttcaaagtctgaaagtcggtgatcgtgtcatggtcgtcgggagctgtttatttgggacgcaattagttctctccgagaacctgtgcgagaagattccaggcggcttaagcttcagtgatgcggccagcatgccttgcgtgttcagtacatcgatatactccatctttgacgttggaaatctgaaaaaaggacaggtttgttccccctcaaccttttgacgttttaggtcatcttttgacatattttatagtccattcttatccatagtgcctgtggtggagttggcattgcgaccattcagcttgctcaaatggttggtgccgagatttacgcaactgtcggtaacgaggagaaggtcaggtatctcatggacacgtttggccttcctcggaacaggatcctaaactcccgtaatgcctcgtttgttgaggatatcatgcgggagacaaatggacagggtgtcgacttggcattgaactcattgtctggtgaactattgcatgctacgtggaaatgcattgcaccttttgggaagatggtcgagattggcaagcgagacttgattggctctggaaaacttgatatgactcctttcttggacaaccggagctattgctgtgtcgacttggatcaaatttgttccagaaagccgatccttgcaaagaagtatgtatcgaaggggatgacaatgtatgagactcgacaactgacatattatgcaggctgctgaaggaaattgtggacctactcaaggagcgctacatctctcctatccgacctatcaaagtctttagttctgatggaatacacgacgctttccgttacatgcagcaaggcactcatctaggaaagatcgttgtctcgatgcgtgatacttcaggccaggtcagcgctgtacaaaacatccagccacgaaaaaagcccacccaactcaacagctccggtgcatacctgctcgtaggtggcctcggaggcctgggtcgggctatatctacgtggatggttcaacgtggagctcgccacctcatatatctttcccgaactgcgggttcgagcgaaagccaccgcgagtttgcccaagagcttgccagtatggattgtcgtgtggactttgttcaaggtagcgtgtccaatatcgcggatgtgaccaccgctgtcacacgggctcaaggccgacttcggggcatcttgcagatgtccatgatgcttcgtgatcggagctttgaacgcatgacactagaagagtggaacacatctgttgatccgaaggtcaagggaacgtggaaccttcacaatgcttctgtatctgccaatgcggaacttgacttctttgttcttttcagttcggtgtctggtgtctttggactccctggtcagatcaactatgctggtgccaacacgttcctggatgcattttctcaataccgattggggttgggactacctgcttgcgcgatcgatatcggtattgtcgaaggagtcggttatgctgccgagcaggatgaaatcttacaaaagctcaaagccgctggtggtctaggcaatacggtctcagtgagcgagcttctgagcgcggtagaggcagcgatgacatctatctcaagtaatttgagaccccaagcaggcaacttcggcgttggaattcggcccaacgtgcctctggccgatcaaagaaaccgtttggtctggaagaaggacatacgaatgtcggtgttccataatactggagcagctggtaccatcttgacttctgcttctgacgctggtgctggcttggaggcttttattacacaggccaagggcgacgctgcgctaataaatcaacctggatctgctcaaatgctcgccgtggaaattggaaagaaggtgtttagcttcttgctgaagcctgaagaagatctggtgacatcttgctccttgtctgatcttggaatggactctctcgtggcaattgaggtgaaacagtggtggaaggcgacatttgggttcgatatcagtgtcctggaattgatgggaatgggctctctcgatatactcggagagcacgctgctcatggcatgcttagattgttccatggtgtacaagatcaagctgattgagcgagatgtggttatgtttcactttttgatgtattaaaaggaacaaatcgggaaatagaatcggcgagatatgatagccaggtctcgccacattccacttctttttctccattaaaacctaagaattatgtggcttaaaagtgacagcagagtaatatgagctatactgcacccaccgtttctaattattcatgttctgctcagacttgatgtgatacctcaggctgaggaagtcggaatatcgtcgcccagattcccaatgccacagccagcatggcgagcaagattggctgcagcaccgtgacccctttagcctgagcaatggcaccaaccataaatgggaaaacagcaccaccacccatagaaagggcagctgcaaagccaatagcggcaacgtgaagatttttgggtagcaatcgtgtcgccacaaccacaactcccgggaagatagtccccataaagaatccaacaaaggcaaccgcaaccgcggacacgatgaactcaggcacgagccagaagatgagctcaagggcaattgcgagcgagatgtagacaacaatggacaacttctctccaattcgtggcgacacaaaccctagcacgaatcgaccgactgtgatgccgagccagaagcctgtctctgccattccggattcgaatgggttgccgtgtcggactttcgtcataaacacgacgatccatccaccgattgctacctcaattccgccatagaggaaaaggaagacggcgcatatccaagtgaccttatatgtaagggcaagacgtgtttgggagaatgctcctcctctgcctgggatactggggttctctttttgatatttactactagtctcatcccagaaagcgctggcggagtaaatcagcgagatcacagctgctccggtctatatttcatcgttagtttgtcgatatccagtggctgtagagaggatcgagataccatcaaatagtaataagagtaccattcccatccagctttggtgattagactcgtagcaatgagagggcttattgtggcccccacgccgaagaatccatggaagaaaccgagcacttcatgcgagttcgccatgtttccgatccatacattccatgccgcgttgtgaaatccgctccccaatccaaccaggacgtacataatcaccaagactggaaagggcgggtggatagatatgactgcaaaggcaagcatatggcaaatcggggcaatgattgtgatccctcgtctgccgaaagtctgatgaactgaattgctcaggatggcggatatggcatatcccacaaagggcgaaaggaacactagagaaatgaccgtgtagctcttttgatagtaaatctctagctgaaaagttcaataagatggtcagcgatcctatacagatcaagtaaagctgagttggtgacacaaacatagggaataattgctccatatgcagcatcattggaccccatcacaaatgcacacaaacacgtggcagtcaccttccatatggttgtttttgactcgttccatcttggtgcgacgttcactgcatgcaaaggtgggctttcatcggtctctgaaggcgtagcttcgggcgtatattgaccaaattcgcccggtgtcggtggccaggatggccgtgaggtcgatcccgcgcttctggtcatttcgaatcgtgtcactcccaaggttgaagagttgaagataagagtaagaattgtgagattgagggggagcggggaaaacaagcaaatgtaaccctgatatcccatgtcctatatgtgtagctttatagatctatctctggaacatgatgcataatatctagttccagttccattgcttctatttaacgtcagttaaatctacattcgcatttgaatcaaaaccaatgatcctagtaagttgcctagcgttccgaagccaacatacagccctagaggccaaataaggatatgaaaagccctcgagggtgcccagatagaacaaagtatcttatagacccctgtcaatcttcaaatcgtgcacatcatcaagtaatgtgggcaatatagtaaatgccggtcacgtggtggtattcagcagcgcgtgtttacccgacatcggaatatctttggaagctaatcggagtcaggtgatctgataagccgataccaaaatagcactgaaataactattatgctcagtaatcaggtcggatgactaattatgccactgttctaaggttgaccaaaggagatacatagtgttcaaaaagtctgttcccactgccccacttgctatccccctaacaaccatcgtggttttttttcttcttcctacacaccccccaatgacattatagtgttcaaaaagtctgttcccactgccccacttgctatccccctaacaaccatcgtggttttttttcttcttcctacacaccccccaatggcattaaccaaggatatccttggtttaggtcgtacaaaatcaggtgagctatctgttactcagcgctcagctattatttatacccaccaggccggtgccacccagtcaaagctagcactcgattttaggtactcccgccgaacgatttacaatactttgaaacggttcaaagaacacaatactgttaaatctctcccttgaaccggtcgcccaaggatctttagtgatcgaactcgccatttactttttatactcgcccgccggcaccccttttggtcctataaaacgctgagttgtgctatacctggtcatccatcccgctctactattattaacgttttaaggctaaccggtcttctaaaatataggacaaaaaggaagattctaatcggaaaggaattagctcgacgacgatatcgttttattcaaaaatagcgctctgagtggtctagaaataacgtttaaaactaggtcttctcggatgagtattctgtacaacgaataacaaactgcagaccacaatggtgttggcgctttcggtcggagggctatagaaaagatcttataaatgctaaggtatacattaaagatatttcacaaatggtttagggtacaatctggttaagaagtcgattagagttgattattataaggcgggagaatattattaacccggaatcgaagaagacaggatatactactatttcctatatagatactctcgaagaaggtctacttccattctatcgaccctactctatcttttagtaagataacactcggatccatactactaaaatcacacaggaatggtttaaaactcacgggatatatatagaggagtagctgccgcactcactagatttaaacccgattgaacctatatagcggtggctaaaggttaaactttttgagttatttcctaagctaatatatataggaaggtctgaggaggattagatagtattcaaaaggtatataaagatagtataggatgctattccgcagtcgaagattgattcattgattttaagtatagggcgcagatatatggcagtacagaaggcaaaggggtattatacaaaatattaaatttaaattttacccgagattggcatagggttcaaccctatttaattcgaagtaaattgagtaaagtatggtggtgctatgcatagatatataaagatatatatttcaatgttcatgggtgaaaatgcgggtgggaacagacttattaaaccccactgtatgtaagccatccatggaaccggccatgatcactagggcggtgatgggagcggtgagccaaaaacacccattggtagtggcacaattcgtcgcccgtaacagatggcggctggcgcctccgtaaatccgtaaacctcccaaggtttccatctaggccagatcagcatcttctcgttgaaatgactacttcgcagatctccccgaaaaagcataatctacgggagttccttcagcctctccgggtcgagctcgagaccttgtatgatttgtcctgtcggctatcatcgtcttataaaaagttggccgcggaatcttcagaacactttattccaacggctctgacttgtcttccaacgggtcatgaaaagggacgctatcttgctgtctattttggtcagtcctaccttcgtgtggccttcatcgacctcttaggagatcaacatgtcgaaggacatgcacgggtacggcgcacgttagagaaggcatggcctattgcagagcatttacgaaaggatcattacattgatctcttcacgtggattggagactgtatcgccgaggtggtggcagacagactcgccaacccaagtgaagagcgggtggaccaaataacgacaggcatttctttttgtcttcctataaagtacagttatctcccagactcggccgtgtgcttctgtggctaatccaatgtagacaagattccctcgatgaagctatcttgatgccgacagggaaaggcttttctttaaactcagacctcaatctccgccaagccttgctgagtggatatgaccgccatacatattcaactcacggggatgaaatgaacatgcctgctaaacgccgcaggctgttttctcttccgaaattgaaagtcgcagtcatgatcaatgatacgacagcgactcttgcttcattagcgtactccatcccttccttacccaacacccgtgttgttatgggtctgatcgtgggcgcgggatgcaacacgaccgttcctatgaaacttgccgacttgcataaatccaaaactaaaagcattcttgaaaagcaccctgacgcagaggaaacgctcatctcgactgaatggactctctccaccgcggcgggtcctttcgacgagctgggtattcgaacaacatgggacctccagctggataggaattgccaaaggcccggttttcagccaatggaatatatgatcggcggtagatacactggcgagctcgtccgcatcgtctgttatgattggttccatggagtcttgggaataccacgctccgagttaccactgaagttggttgaggaatattctctttcaacagactacctctctcttgttgttgcctcttctctatccgatgagcgcttagcaagcgagctgtccaagacactccagccatctcccgagagtgattggacctggtcgcctgaatatgcccgtgatattcgggtcattgcctcaactgtgcaggatcgagctgcttctttggtggcatctgcggttgttggtctcctagactgcactaatgaggtccaattgtgcaacacggcacccaagtgcaacaatggagaaaaagtcaatacggaagctggagttactgaacagacggactccgaatcggtctcatcaccaacgcgaggttggaatagcgggcccgaagaactcgctgtggccttctcgggtggagtgattcagcactatcctcactataaagaaactgtacagagatatattgatcgacttctactgcgagctggtcctcaagtaggagggaaaagtgtcttcttgcgggaggccagtgatggcgggctcatcggaactggtgtccttgcaggaactgcctcgggggaaattggggaaatcaaggttactcctaattagatatcaactaattcccctaattcatagtcatatagatgggttataaatattatctcacattttccccctcggagcttcaccggggagaaatgcatatcacatgtcgaaaagccgtttctatataaattactgcctcgctataagtctaggcatcccccacagatgcgaggacacatggagagaaattgcgcgaaagcaatgcccaagaaaccatttgaaagaacgtgtaaacttgatgaatgctcaacacggtcgattctcagttccaagagtacacactacgtcacatgttaggccttcaagaatcacaacctctttcaatttgtagcatttttgttcttctaaatcatcacatagcagatacagtagcaactgctctccctagatcattctccaaatcatcaaatgagcagatggagtagcaactgctgtccataatgctcgctgtagtgtagcccttctgcttaccatctccagccctctttgtcgaaaagcacatcagtggccgtgacaggaaagaactgatccatttccttggatttcagaaccaggctataccagatacggattctatcaatccactcctcgcttgtgtcgatgcgaaccgcgttactgaatccggagatgtgcctgaagaccattagctcgttcaacattagaaatgatatcatggggcatacatctccccgttgttccaatcgtaaatgatcttggacgactcagacatgagtggccgatatccgcatttcacaagcttcctggttcctattagctctaggtactttgtcgtaatcagagtgccctaaaacatacttgtaagcctcgcaaaacttgtgccgaatctcctctcgcttggatatgggataactccaaaacccttttctatcaagggagtctccggggactttctcccacaccagataagtgatgtagccccccggggacgatatcgtcctcatcttacttccccgagtgatacccaaggagcttaggcacagcatcacagccttgttcccggaggtccttgagggcaatcagctcgatgtagtcaggtgattcgacggcctgggcagcacggattgtaggcttctggaactcagtcccagcgataggaatctgcttgtaaattcgcataaatgcgatcttttgggcatcggaaccggcggggcgacaaagaaactttccagcaacatctgaagggcccaacccatcggccacgtctcgctcgtcctcgacctctgcgttctcttcaagcttctcgacaatttcccaggtgccggtgtgaaacagcggttgtggcgatgagttgagggtaacctcggtgccttcaaggccgacgaggtattccaaagatgtggtcattatgggctgacagttgataaaactggaaaggcaattacaagagtttagaaagtagggtagacagagagtgaagaagagaggaagaaaagtttgtgggttgtcctagtcatcacctggtcattctcaggatacacacagcaaacaaaggcaatcactgtcatgacacagtcaaactagatcccatatcgacataactactcagttagctaccatatgcttgactttcatgccatatcgtggccatcacgtttacaccataaatattagttcccagtgtatctgattggaataacgcgagtaggtcaagttgtatgggtctctaactctctaaaataacatccgaaaatgacaatttggtgggacacaggacacgaccacaatgtcaaggatttctgaatctaagaacagaggcagccggaaaaaaagatcccaaaacaaaattcaaatgatgcggttgtgtgtgtattgaacaagacatggtgaatggaaatcctagatagagatccactggttcctaggcgtatttcggtacacgaccctgaccagctgctacgctcgccaggaaaaagaagcattgcttcgtcgaaggaggctccatctccagtgggtccgcgtgtgtcgtcgacttcacgatgggtgaatactcaattccccaggtatttcccaccatagtctgtcgcaggaatatggtctgctggtagtttgttatccagccgtacataatgcgaaggtctaacatatagcctactggctgggccaggagttgtcgcattgttcatcaccatggggttttcatttcgccgatagccttgagcttgtaggtagtcgcgggtcggttgagatcaatgcaaagtcaggcaccaggctgtactgtacccctgctgccttgaaatcaccaaactgcatggatttcatctgggcgtctagagccgctccaacaatttgtcccaccgattgctggaagcggccctagacgccatgttcgtcgcccatggagacaagctcgcgatgtaggtctcgagtcgcaagattgtggtcgacgacttttttcgaccactgttcaacatttgtgagaccccagacagagcctagaaagcttgtccactcccttagagggccaataaaagtggctttcttcaaggcagatgatgttgtgtgatcatcttcgacgaggaggtcagggagagcgttgtggataactttcttggcagttagtttcttcaccattctggtggattcctaatagaatcctcgttaatataccaagacagcgtagcgtgtaccgatcctagactctagagtctgactcacttgaagtaagagccgtagaatgtggaaggagaggatatgatgtaggaaatcctagaccacagtggtgccggagaagtgtgtagctacagtggtgatggagaagaaaacattcttttttatatgggaggcgcggtttggtagtcatctcgcagaagatgcttctccttgtttccagaggtagagatcgttgtacagctccatgccagtagcaaacaatctgttgacaaacaaaagaagcaaataacaaatatgaaacaagcaagcaaacagtgtaagcaagcatctgatccacgatctatagagtcattagtatagtctacctagttagttgtactatatggttaatgacattactattatatgtcttttttggtatctttttgggtgcccgttttggtgtcctttttgatatcttttacattactattttttaaggatcttgatactaccatagtactaccattacttgggtactatcgactcgcttaattctctacgatgtagacaggaacgacccccagaccgtaaaaagtaggacaggagtgtagctcctgggaaaaccgatggacgtacaaggagacgatcaaccaaaagtgaactgtctagatagatggaagattattatctagctaaaccagaggttgcacgtttgcaatgtttatagaagttgccagctatatcaacattcccacttcttcacttgcttcttcttcttctctgtctatcttatttatcgaatagacctggcacatcacaccagagtgaataagaataagatcaataaaattgagattacatagtcagtcgactgtataggtgtgcaaatagttttgtagagtagtttctcgttgccaagtctctggtctccgatttcaatatatatcagcccctatttggttagaatccgccaagaactgaacgcaagacttttcctcttcctctattgcgatatctcaacgcgaataatcatgaaattcttcgatgtaagagaatctctttcattttttcaagcagcctgattaacactagcaccagggcgccgtcacattcacggcagaccaattccaaggcatctaccgaggaaagcaatatcacgaaccagattttgcagaagtcctgaaaagagcccgagaacatggatgtgaaaggaccatgctcaccaccatgactctagagggcgcaaaacaaaatttgcaggcagtgagggagttccccgcgatgtgcaaaatgaccttaggcgtgcatccgtaccatgccgccgagatctatggacagccagagtcccaatatctgaatgagctgcgcgaactaggtgaaacgctcctagctgagagtccctcgcctttggctgcgtttggggaaatcgggttggactatgagtacctggatcgggccgataaggaaacgcagcaacgcgcattccgcgaccaattagagctggccgtgcaattccagttaccgttgttcttgcatgttcgtgagtcagccaaagattttatttccatcatcaagccttttctgccaagactgtcgcgtggtggattggtgcattcttttgcagggacgaagggggagatgctccagctcgtggaactgggtcttgacattagtgtcaacggtatctcattccggacagatgaacagttggaaatggtcagaaatattccattgaacaagttgcaactggagactgatgcgccatggtgcgaggtcttgtctaatgaccccaaaatcgcgggttatctggaaactgcgaagccgttgccggcgagtcggaaacataacaagtttgtactaggccagatggtcaagacacggaatgaaagttgtactatagagcgtgtcgggttggttgtagccggtttgaagggtgtcgctatggaagaagtggctgaggccgcttggaacaatagcagtcggatgttttggttgtgaatatataccgttgagcaggaaaattagaacaatgtacaggacttgaagaatctctttttgatttagctggtttaattggatcattagaagtatcgatacttgaagctcatttgtagcatgcttaactagcagagtaatgcagactagtagtagttatactacgtaccccaaaatgcgccgtgtagatctagtagcaacaagctttttcctacgccatgaactcaaaagcaatcttggtagatcgacgtagatgtaaacaaagcccttgtatcagcgaactatgactggtgccctgaatagacatgcaggggggaacacaggggtttcgatcgccccttagggcccgggcatgaggccgagccccaaactggttctatttcacaggccacgatcggccgaaatgaagtagacagaatggagatttgtcaatctcaatacttgattactggacaattaaatctataaataattgtgacgcgtccttttttgtcttttcgggatcaagattcctgaacagaacttggctcacggagattaatacaggttggaatgaaggaagacgtgatgccttctttttcacattcgatcgctcagagcccactatgttgcccctcgagtcgttgccactatacagcagggttcgtttatatggcgatctgagtatctgaacaacacgaagtagggaaaagatctatatgactttctaatgggtgtattgagatcttaaatagactcattgattgtgttaaattgtcaattatttacccttaaccgcctatgcgaagttaagcacacatcatgatggagggccacggtttgttgacattcttgacgttgcgagggccatcgctgaaccatcagcgcatgggtatctgccattcctccacggagttatgtggaatgttattgaccactggccatgtatttatactaattgctgtcgaccagctcgatctttattcacacttctcaagcctctacactcttaaattgaccctggtggttaagtgtttatcgaagtcaatatacaaactttgcaaagacgttgtaagttaatcgctgaggactgcttcgttctttcctcaaaattcattcgatgcggccattgtcacttccgagactaacaagcgacttagaaacacatcaatcacaatgaagggcacattgatcctctctggtcttctggccaccactgtctcggctcacatgcagttgaacaagccttaccctatccgcagtcccttaaacaaggatgccaagggcgagaaggattattcttacaccaaccctctctccacctcgggtagcgattacccatgcaaaggatatgccaatgatgcctttgaggctgtggatacatggcaaccaggctccacccaagagatgtcgttggaaggcagtgccacccatgacggcggctcatgccagctctccctgacttatgacaagggtaagacattcaaggtcattgagtcgatcgagggtgactgccctattgctaagaagtaccaatttgatgtcccctcggacgcacccaccggtgatgctctgttcgcttggacctggttcaacaaggtcggcaaccgcgagatgtacatgaactgtgccatgatcacaattggtggttccagcaaccacaccgttgtcgactccgagggccgtgtggctaaggagaccccaaagcaggcgctcagccagaagacccatacccacactacgaacgcgaagagcagcttcgatagtctccctgatctcttcattgccaacgccaaccaggctggcaagtgtgtgaccgtcgagggccaggctgttcacttccccaagcccggtcccaaactgatcggcaaggccgatggccctggctacaagtgcgccgaccatgctcccttcctggacgacagttctgattccgcgacgaagtcatccaataccagcacctctacctccgccacctccactacttccaccacccccaagtccgagaaaaagcctgctgtcatcagcacctcctcattcaccacgaaggcgatttccaagatcgcccaggccctcgccactccttctgtcgcagctgactcccgtgtgcaatctgccgaggactcatccaacaaccagtttgtcgaccatgtcggtcaatggtcttgccactctggggaaattctttgctccccagatgggttgacctttgccatgtgcactaacggcaagcccatcttcatgggatccgtcgctgctggtactatttgccgttggggagctatcactgctcgccagtaaaggtgttaattctttttttcatttctcttgccgattgtttttttttttttccgcatacatcccagtggatattttgagttatcccagtctatagactgatcagtcgagtgaggttcactcgccaccgccggtcttcacttttcacagttcatgatttcattcagcctggctttgggcactctttattgttcgtcttatatttgtttcacccatgacctgttaagcgatgacccagtttatgtcgttattgtcaagcaaactacctaatgattgagtgtgttaattcaaaaattctatacatcctctcaagacatagttctcccatagaacgtcaaacatcaaagtgacaggatcaaataaagatttagtctgtatcttgtacaatgccttctcactgtgttgtcaccgtaacttgcagatggatattcacttacaatctcagcacaaagttagccgaatcagtgttggtgtagatcatctataggtctgcttatcatagagtatcaacaatcattccttccctgaaatgaattgaaaaaaatggaaaaggtggaaaggtcgaaaggtaaagtggcacctatagagacgtgaccaagcccagcgccaggcggtagtggcttgcggctgccaccgggcagcattggcttccgggtgcctatttagttaagagaatccgttgtttacttttttctcttctctatttctctggcatctcagatactcaccacatgagtttcccaatatgatcaacccgggatgactcttccaatttcctacaatcctatcagcttttacggcaagtcttctggtgaaggcttggacccgtacccatttgaatgaaagaaagggttcatggtgcgggtaaatgaaagaaagtcccggagagcgagcttcttgatagcttcggcgaagtgaagtagaacctcaaatacgtacggctcactgacgacgctgctatcatctctctctgcatacatgacaagaccgagccatcatctaccctgggactttgattcaaagggagacatcaggaaggtccgagtccaactgtaagtgcagtgtctcttttgaatacgaagttttacaataccaatgatgctactttgcataagacagatgatctcgtgtgatacgggataaatggcttgctgcgctatataccgcgagctcttacgggtcaagatctgcgacctgctggaattttcacaagaagcaacaatgatctagaacgatcaagaccccaatttttggtctccggatgttcatcgtgagagagtctatgtggggcttggtggcattgagagcaccaatctttcgcatttcatacccttcgagtctcctctcatgttcggaggtgctttgagcttcagtcaaagcgttgtatggacggccaacagtcatcatatgttatttttgatcacctggatgagcctaccctccagtagggggggggatgtatcgataatgtgtctgcagggagcctccttcaacattcattcgtgactcgtaacttctcttcccaaactctcatcctcaagatgtcgtcggccagcagagaagcagagtcactttcgcaaaccttccatgaaattgcaaacaaaatcactgactcacaaaagattcgaggttgcacacaaggactgcatcagacagactggctgaatggacatggtccttggttttgttcgacaagtcactgtgtatatctggaccgcgattcggattatacgaggcattgaaacctcacattgtcccctgggcatgatcaggtatcaattgccatgattacggaggaggaagcactttccggctacttttgtaatgggttcaacacagaggatttctatctctgtttccgatttgctgagatcctcgacatcgaaaggacaggcccagccagacagccataccttcgaaagtcagtctcctactaagatcctgaggtggagggaagatgatggggtcttactctacgtatagttgtttaccaaaattcaccttgtgccatggggccttctctgggccttctcctagtgcaaatgaagaatactacggacagagcttatgattttgggctctaggattgccatgtttgtcctgtttgataggactatgaatcgaaacatctctctccccattttagcaatgtatgcgaagtggcccgctaaatggaatgaacctggcccaagatattcaactgcacttggatcaaggagggcccgggtaaatgtagctttttcctaggtgcatctcttgcgagatctgtcggtgggcgtggatcaaagacaggaacatgtcactctcttttaaaacatgttttcgagtccctaaataagtattcgctgtgttttctctgtcccgtcaagcttcgagtatggaaaccgccaaacatgataaaccgaaaacgtttgctagagtgaagcctgtcaccaatgtagagcttgatgccttgcaaagaacgtcatcatcaacaatctaccattggttccccgcatggtcggatccggtacgccgcatgcggaaagtgaggctgaacgctattgcgtccaggaacacgaaactcaaatctagacccctgacgaagttacaggatatagataaatatttatggggcaatgtattcattaatattaaacgtgacaaggtagtctcgaaagacccaagtatggtcgccagatatccttcaacatattgtacaatccagtctaatcacaaacatagcagtggtatcttggctttcaaataacacaaaaggggcatagaatcatcggccagtgcacgagcactagtctactcagaaaagatactgtaacagcaagcatccgacagcaacctagatgttgccagtatacgccgagttaccatagccatagccaccggcagcaggggcagcagttggaggattggtggtgttcttgtttttgttccaagagttgaaccaggtcttttcgttgtggggctcggtacccatctcgacgtcgtagggggttgggtggccaggtagggtatcggcggcgccagtagccatggggctattcttattgcggcgccagaaggccttgcggctgccgttggtgtagccgttggtaggggagggaccgaaacgcttctcgcgcttgtggtggcgggcgagaaggatctggaagaggatggagatcaagtagaagaagctgggggataaattagcatgattcagatagccgtaatccggggtacactcacattccgataatcgccactgcgaagacgaccttttccagtttgcaggccatgctgaatttcagacttgccgacacggtcgaatcgtcggcattgcccgtgcccattggcgtgtccagtgttccggtgcatttatcaactcccttgcgggtcatgatggcgatggcgatcatcgcgcccacgaagcatatatccagggcaacgcccaggaatgcgaagaaggctacaccgcccagacagcaggttaaaacgacgccgagcagactgtaggcggtcgctgcacctgataagccttcaacggccttgatccatgtcgcaatgtgttggtcatttttggccaagacagccagaaaatatgagaagatgccgaggatgacagcagcatcaaggaactgcagaacacgcagtccgagattgaaaaagcggaggattaccccgccagctcccatcttgtatagtgtatatgattatttgggtatagaggtgacagtaacgacaacagggtccaggggagaatatatgaaagaaactcaggcagcaggatttgggcgagttaataagggtggaccgaaacaattggcgatcagtggatggcggcacaatagggtacaatagtacgtcgatcctggacgacaccggcagctcaatggccaacggcgtctgcgccacactctaaatgaccccagatgggcccactcggtgatgtcagtaccatggattggggagtttagggttccaccctggctgtctccggttagagagttcgccaccgtaccacgtgaggaaaaaaatcaatacaatgttgtagtgctccagccacactgccaagacaatttcaacttctaccatgacccttacactttatactttatactatccatagattccacacatatcattgcttcctatttataggtaaccagccttcacatgatcaactgttccttgaacctggtccgaggtgttcatcgagactttcagaataaagctagcacagattgaacagtatgaacttatttcatatcctttcatgcatgacacaactttcatatacagaccatgttgttcgacaccgactaaccagccactactgttatattttactttccagcgccttcatattacataatttgcctattttcattggccctttcatccatgggtgtggctgtgctgcactgccatctagatttcattgtatgagcccgccacgctgggaatgacgtctgcatccacccatctcactaggttttacacgccacgttttgccgtttacaaacattacaaacatacgaggtacaatgggaagtttgatattaaaactgggtccgccacatggaatggcacatcctcttggtggtcaagtttgcggggtaaccagaacgagatgcagtatagcaaggcgagagagattgaaaaaaaaaattaatatgtgcccatatggtacctgtgagcttgtgatccatcaaatccccaagctagcgcgtgtcgcctaaataaatctaggatatggtgctgctaaccggacgaagcacatttttagtcaggagcatatttatgattccggccttgtaaagattccgtcatcgacccggacggacaagatatatcggaccaatgctaggtaggtcgtagagtggtatgactgccgcccaggttctcgggcctatggacacctgttgcccaaagctgttcaaatcaagcgagcttcttggaaaaacaggaatatggccattaatgcaggtgttgggttgaccttgccaatgtccagggatgtctagcaatgaactctatcaggctctcgtgttccaacccatattttactccattttgggaaatctgaaaatgaaagcggcaaaatcctcggcagtagctcgtgaggtatggaagtggacggtatcttcttgtcgaccatcaggagtcttcctggcgctgcttttcttgttcagcgaaagcacggagaattgaatccagtccctcattacggcgagcgagtagcatcacgtcggatacattgacggtagatctcccagcgtgcctgaaaaaaaaacgaggttagtacatttcttattagatgtatgtaccatcccgaacaattggctactcaatcgcagcaatgcgtttgcttacttcgcaaaggattctagatcctggctgaccgtctctgcgaacatagtcagttataagggtaaagccgggaacttgaccaaaaaagtggaacttacctatctgagcccaaaccatctctgtcaacgcaccgatgaactgcggagtggcattgacgcctagcctgatagtctcctcatccacgatcttaccgatagacaaccacagcgcggatttcaagcgctacaaaagagagttagctagttacataccaagatcctcctgagactgacctcctccagactagcctcttcagtctgctccatggtgatgtgatagtgcaagacaacaagccgagcgcgtgcccatataaaaccaacaacatatgattggccgacgacgcgtccacggattaacggctaatccggcaacagtcccacgctaaccccgaaacagacatctctcgttgcgggagccacggaatatcgaagaagcgcaaagcaatgacagatcccctcaattaatccctcaacccttaatcttttaaaaatcccccctactccactctcaactccctctgagtgtcctcttctccaaccaccccattcagcgggtagccaccgagcacctcccaccttccacaagccctcaaccaaaccaaaaaaaattaccaccggccaaatcacacacacacacacacacacacacacacacaccatggccacgccaaagcccgatctgagcgacgcggccgccgcggccgccgaagatttcttcagccagatctacagcttcttcgagctggttgtcacacggctgttcaaaaacggctacgcctccatcgtgcagatgaccgagatgagcggcaagcgctgggcccgagtcatcggcgtcgtcgtcgtgtacctaattctccgcccgtacatcgagaagatgttcaagtggatgtacgagcgcgaccgtcgcaaggagaaggaaaagcgcgagaaggagagggcgcagttcgggaaggtcaaggtctcggcgaactcgctgcgtgctggtggggacaaggggaaggtccttggtgaagtcgataacacggatgacgagctcgaggatgaggaggatgttatggctgctgctagtggtgttcctgagtggaatgacttggctcggaagcgtcagaagaattatattaagcgtgtcaagaaggatcagcgcgcgcaggatttgagccgggagcagattttggagttgttggattggagtagtgaggaggaggaggtggatgcgaaggtcaagaaggatctatgagatttcgacttgtcttggtctagggctgttcttgtatctgtgcattgcatgggaggttatgctgcttgtattgtttaatactagattctaatttaataagacctccacggtctctctagctttaagcgaattttctgatctactcgtagcatctctactgaggactctttaccttgcacataacatatacttggaagtcataaatctactatttgcatctaaagaatgcatccaatccaatcatacccgagccagaactttatcctgggccgttctagaaactatgtagcgatcgccggatcttatccgtattcatgaacaattcgtaacatatcaccaatgtctcgcaagagatcagtgaagcctccgtaaggcctcgatcattctcttgacctcctgcacgtctgaggagccaacatcctgcacaatctcctcctgcatgcttggtgtgcagtgcaagaactgctcaataagttcgccgtccacgaaccgatatggtgtatcggcgctgcgcaccatagttctgaagccgcggaacttgtcgaatgataagttacccaacgaggtgactttggtagaaaggacagattgcagggtcataaggaagtcttgatgttcggggttgataacggcgaagaggaatatagagccctcgacctttgaatgggttagtaaatgagcctttaatgccggtcaaccaagtcaacaaggaacttactgttgctatgaacgctcgcggtgtcaccgtaatgctggacagctgtggaatattaactggtcggatacgattgaccatctcccctagtgacatctcgctagtggggatcaacctgtgcttgtcctgggcggtgactccattcgtattccgagcgagaacgataaggtttccctcggcgtcgctctggaggaatgtctcgtccccaacacaggcaactgctgtgctccagacggtctggtagtgacgaccgacttcggtcagcttggcagcttccccagcgtggcccggtgtaaacctcacaaggcaaaggctcttcatgagatctgccactgcgattaagttgtcgacgactgttacatcgactggtgcggtggaggtccggtatgcaacaagcttctcgagcttcattggtccaacgttattggctttgactctatacacaacaacctaatcatcgttagtacagggttcaaacatacacgcggttagtactcacagtcttaacaagtgccgcaacaacgcagtcgcccatgatagcgagggcccgacaggcccccataaccggcagctcggcgacttggctcagcttgcggccgtggtcgacttccagaatgaggatccgcccgcggatcgattcttcctggtcttcatctgcaaatgccgtgccaacaataaagcggtccttcgtgatctcttttccattttcatctttccctgccgggagttccgcacgaacaacgctctccaccagttcgtcggggcccatttctaacgcatcaaggcgccggaacatgatctcatcagcaaggacaaagtagcttttgacaacctcggcgccattctcgagcttgcgatcaatcgtgccaattccaaatgccttctcagaaggggagtatgccacacgacggacagtcgagcccattggtaaagtttgaatttgggttgtgcgctctctgtcaaccagcgcgatcttcagctctttctcggttgccacggcgatagaacctgggaacgcctctgcatttaaatggcatacccgtgatgcaccctcggagttcactgcggagtagatgatccggccctcggaaccatagattaggctgggattctcgcaggtagcgaagacgttgtatagcccgtcacccttggggagtttcttgaatatgggttgttcggagccaagaatcagcttgttcatctcactaagcgagtagtcttgtgggttgagtgagaatgtaatgacgcagccatcagccatggagatgaagagggtaggctggctgtctgcgagcacttcggctacaagaactgatcgaggaaagctctccccagtagggccgagggactttgtttggagaacagtgaagtccttaatagccaggattgacaccttggccgattgcgggaaccctgcgatgcaaacccctgttggcgttgatgggacggtcagaccggagatttgctggtcagcgccgagatctttctgcgtgatgatctggatattgtccctgatatcaaaggatgccacgacttggccgctaataacgagaaccagatggtcctcattagccgacacggcggtgatcagcttctggtcctgaggagcccattcaaatgtcaccatgccgctttctagatcggccactagcactcgttgttctgtgacctgaagaatacgaccgccctgaagtcttgtggcgagaagagtgcattccgtgagtgaaagccccaggaagttatccaattcttcaacttcaccgtcagggttaaattggaacacacgtgtttcgtcaacaaatgtaacaataagcgtatcaaggaagtcgcctttgcttcgagtttgcagtccccagagatcagtgatgtgttccatttctcccagcacacctaactcctccatgccaacaccactccgcacactgcgtaatgtcccgtcgtcaaaggcaccagaacccgtcacaatccgagcctgcccagatgaaaactcatgcgtttggctctcgtttgtgcggttcccaagatccataatagtaaaatcgagaatcggtgcgatgttagacaatgtctggatcacttcaaacgagcttccgtcgagccggaggacctgagagtcgccgtgatgcgagccaacaaacaacatgcctccgccgagatagaccaggaccgatgcacgagacgtcttgcccagatactcgagcttccagtcatcaatttcacctaagttgttcaggatgaaagacaagaaaaatagccttccatagtcatcagccaatagccaccgctgactatcgaccttctcccaggccacgaagaccgtcgcttcgtcaagattccgcgtaatcacatcgttggcattatcgtcgatatacttgatcgacgtctccccaagcacaatgagaccacccagcggagccgggatagggataagatgcgacgatccaagatcaagctcctgtccaaattcacccccttccaacttctgcacctccttgaagctagcatccgccggagtccccgaagtgcccggcgtgaaatccaactcgcggattcgaagccgcaccttctgctggttatcttcatagagcaatgccaaccaaggattagattccgaatgcaagaatgccgaagaccgaacgaaaatctcgtcgatgcgggatgcagtcggcttatcaagttcccccacctgcaacggcaagtcagcctgggaccctgccatcgacacccggcctcttttcttcgtcggctgcacgatcggcacaacaacaatcacaccctcgtatacttccagcgtcatgaacctccccgtgggatcgatcagacatcgtggtgcgcattgggactcccggcatgagggctcggagatatcaatacacgagcgcgcagtttttatctcacttgattcgcggtcccaggttattgtaaaatagttatattggtctgtgccgatgaagagatggtcggttggggaattcgttggcgcgggtaggcgtgcaagcatagtgacccgcgcattcagagcacgggtcgcggtcaggacgagtccatccggcgtgagcgtgtagaactcaagacgactggcttttctgtgtgttggcagggttagcttgtcatcgggcggcgggtcggcttaggttccgtagattggcgggatgggactcacgctgcgactaggcactcctcgtccggagagaaaaagtttagcttcactgcatggcgaatgctgcttgcccggtggatgggcacgacataagccatggtgattcaatagcccgaggtatctggacagcgcggagctggttggggcttaagcttcggcgcagcaccctgcgggggtgggatatctccgagagtaaaatgtacaagggattgagatggcggaggttgacggtgttgatttatagattgcacattctctagttcaactctgttagggtaggattgcttagtcggtggggaagatgaaagaggttgaggttcccgtgcaaatgacgtctaaagtccgcgcttacaaccgaaaacatctcgacagtcgttcttagttgcaattgaataaatagttacatacatgatggttcaatttgaaagaaagagaaaaagattaaattccttttaaaatcacaagtctaaagtcatacgccgcccaggcggcagtcatagctaacaagctcaaggtcctaacgtgaggccaatgataggaaaacatgcagcgcgaaggaaacaaaaggcgtatcgtatggaacaaaatgataatatataggcgcgatcatctagcatggtgcaagtgcaaagaagtgttcgtaaatcatgagatcatgaccagacgtcctcctggtaactgccgctgctacgcatgtgcttgaccatctcctcgcccttctcagcgggcaaaccccgttgctgggcaataatgtgaccaaggaccaaattgacctcacgggccatgttggcagcatcaccgcagacgtagaagttggccttttgcttgagcaggtcgctgaccagctcggcgttctccttcagacggtgttggacgtaaatcttctcggctccctcgcgggagaaggcagtaataatcttcagggagtcacccatttgatcttggaaagtctaatgaatcatattagtatgaatgtgggatttcaagtgtaagagggtattgtcataccttgaactcatccttgtacatgaaatcctcgtcgctcttacggcatccaaagaacaatagtgttgtgccaaccttctctcccttggcaacaagagcagcacgttcctgaatgaaaccacggaaaggcgcgacaccagtaccggggccaaccataatgataggcttggccgggtcggaaggtagcttaaagttggagtgacgaacgtggacaggtacgtggataccatcgtacttgttgcgaggaccggtgattgagtaagtcaggccgtgggggtcaggggaaggatcgccgttctgcttctgcttgagagccaggaggtagttggtggtgacacccttgaccatgtgcgaggcacccggcagacgaacagactcgacaacagcggtgatgctgatcttatccttttgaacgagagatgacgaagagatagagtaataccgaggctggagcttgttgagaccctcaataagcaacgagaaaggaacggcagtgaacggcttagaagtgatgctttggagcgcctgggcaatggtaaagcgctggtcggcgatcttctcatggaagtaatccttatcgttacccaagcggaccatttcgaccttgctctcctcatcgggagcgaaagcagcgagggacgagacaaactgacgagagacgggggcgcagacttccatgtagtagcggacagcggcatcataggtggtcggggtcgggataggaaccttggcagtgacatcgatacccttgacgttgatcaccgagtgccgcttctcctcaagaccaaagacctgaaggaagcgatcgacttcggcgccagcgttcgtaggccagatggcaatgtgatcaccagtctggtagctgaggttgctaccagcgatgctgatttccatgtgcagacagttgcggtccttgacggtgaacagttcagaggattcaacaatcggggcaatgtaagggttctgcgcggagaagggacccttggcgcgatcttcacggtgggaagcagtaggctcgcccaggtagacggactcgtcctcgggggatttctcatcatcctcgacaacggagaaaacggcttcgtagacagcttcgcgttcctggagactcatggcttccgacagagcagcccacatgggctccttccaggccaggaaatcctcttccatggttccggcgccatcgtcgccctcgccagcagttccaatgcgctgcgcaccaagtttggtcagagctgcatcaacctgacggaccatggcgttgtagtgctcataggtgttgtttcccaggccaaatgtgacatacttcaacgaggacaaaggcttatcttcggcggaggcgccgctctcgaaggcgacgtcctccccggtgaagaattggtagaactccacggcgttatcggtaggctcaccctctccgtaggtggccagcacgaagaatgcgaccttatcatcggggaatttgtccaggttctcgtagtcatagtcctcaatgtcagcgaccatagtcttcagtccgaagcgctgagagccttccttggcgaggcgagatgcataatcctctgcagtaccagtctgggagccgtagaagatgacacagttcttgtttgtctcttccatcttctccacgatgtcgcgggtcttgccgcttttagcagctccattctgagtggcggccgaggaggcatatgggtctttggggacagcccagtagctacccttggtgaaataggcaacgctacccaccaagagagccaccaagacgaccaaatcgagtgtatccagctgcgccattatggtgtggtgcgtacctcgcggggaacaggggaggggtttgttgaggcgcgaattcccgccgggaggggagaattggttgaatatgttccaaagccgggagagcaaacacacaaaggcagtcaagtaaaagaagttttacttcggcaaggatgcgcccccagcaaagaggtctaaacgacgtgtatgttgtacagaataggaagaggaatgagagaagccgacaggtggtctgatcgatccactcgtcctgggcttccggactttctgtggaccttcacggggcaaatctcaccgctgtctgcttacgttggaaactccgagtgtgaagtacatacgaaagtacagaaaaaggtccgatagaatagaaatagcgaaaagtagatcagaaaaataagagtataagagtataagaatataaaaagacactcagaccacccaacccgttttatagtgacaatcgccgagggcaagtcttcggaagcaatgtcggccccaacatgtatggatcataccccgtactccgtaccgtccggcatttttcctaacgttatctagtacggaatatcaaatagggacattccccggccctggagaagaaggcggagctcgggtaagagaagcggctttgctgttcgggaaacgacaacaggcctatgttgtctctgtcgttctgctgcggaatagattccgctctccttccgttctcttcgcttcgagaagatctacatcagaacagctcgaggcttgatagttcccctaacgtggcaaattgcctttctgggctctcggaccccggccttgacatccctgacgtgtggggaagatcgtctatgtagtgcattgtgcgttactctacggagtcgatgttgttgagcttcgacgtttcttctttatatggtgcatatatttcccctggccataatgagaactatattttcaggcttcatctatcgtatagattctgagaatattgacaatataatatcttacaggcgaatgatgtgccgagcccctgatacgttggggttatatatatccaaacacagaagaactatatcatacccaattgcatagcatacattcctcaggtccctccacgggttctcaacgacaatatacatttgtttcaagtattctacttcgtaccccgcgcatttgaaaccatccgatccgacgtcccctgagatccttgttccttacatcagacctgcagctcgactatgacaagcataactattatactataactatatattagaggaaaaagaatgactggataacggctctggatatctcaatttcttctaggcgatacaaaggaatggaaaaagggtcaacaacaaagagaagccaatagacgagtgaggctctgtgggggagacgtaagagccaagactacgcacctgggacagccctggaatgcccgatggcaaagaaatcagctgaacgtgtataatatatgaaaggaaacataatttccaggactatagactatagagggtttcaaattgatcaataatgcaaaatgctagttcactagatataaatacatctaatctgaggcttaataataattctcctcccagatgtacccgagcgcccgataaaaacatcaagctctctcaactcttatgccttcacaccccttggcttcttgaattggctatgtgcagcttgcaatctttgattcctgacatgggctgcttgcaggtttgagcaatgaggtcctcataatctccaacagtacgtattgcaaacactatcgttatcggagcaaacggactcggtctgacatatgaatctccagtggcttcacaccctgccaaagccggcccaggccaggcaatcctgcccctcattcccgacgacctcaaatccgcatcgtatcataatctcgcatctccatcagaacgccgagggaccaggaccgcccagtccactcctttgcacagtcgcgagtcctctgccgtccgaggaagacaagttgatccctccacgctcgcccctatccatcctcgacgcggtcattccggttccaagagccccgacgtatcgggcagtcgccctccaggatatgaagtggggttagagagacggccctccaactcgtatggtcaccaccggcagacctccatcgtacacggtatgcagcattcacgaaacaccagtatggccggatcaaccgcttccacgagccctttgagcccggagatcattgcttccctcggtcgcggtgcgtttgacgaggcgacccttcctgcgaaatttgatcctctcgagacgcactccggttattcgacaccgtccggaatatccgttagtcatgcgttgccgccaacattgagtacgatcaaagacaatgacacaacactgagggatgtgagtccggccgccatacttcacaaccgaatgaactcgggaggaaagccgagacgcgagcggtcagatagtcgttcacagtccaagcatcactcggaatcgaagacggttggggaatatgcattgcatcatctgttcaactcatttgtgggacaggcggacaacaagatcaaccaggccatcatgaagctgggggaatccgatgctcccgtggaggaggtttgcggcccaggagcagatccgactttcgatcaattgatatcggctttgggacatatcgctcggcagaagccgaaacctctgattgacacaattatgttctggcgcaaggctaagggtgatgctgctattacagcgagacagatgctgaatgagcaaagaccctcgtccgctgccacggaaaatgtccctctcctgcgccgcaacactgagccgacacagccggctgatcccactgcgactccagaacgggcgcagcaatcgatgccctttatgggtcgtcccgaggaagtcgctttgatagagcgacgcgcaacggtctcggtatatctagtctgtagagtcttgatcgagatcttccatcagagtagtctggcttcaatcactctggacatggcggatcgcttagaagacattgtgtttggccaggtgaaaacctctgacccggaccagatctcggcgtcacctctgcgaatggccaattggagaatctatggccagttgctgggtattatgagtgaatccaatttctccggcgttgcgaatcgttacttgatggaactggagcgctaccagaaggaggaagttacacgggggccatcccgcgaaagcgattcaaagtcggaattgttgatcctctgcatgcgatatctgcgtttgcctatgacttcagaagggtggccaaagtcttgtgatttcatgcgatcgttggcacgcttgtttgtgaatgctcatgggcagcgcatcaaacaggcatactgctacgtggttgaaaagcttcttctgcccgtcgctgccaacccaagctgcgatctttcactgcctcggtggaaggaattcgtggatttgatccaaccgcgcttaacacagcttcttatcaagcctcgtcattggacatcttccttctcgttgaatgtgctgttgctttgtatctccaacaaagagaccttttcttcacaatggcttcctatgatttcaagcttgcctgcacgtttgaaggaccgccctactcgtgcacccgccctccacgccatctgtcgtctggtttggacctatttcttccgcttctccgattcccccacaaccactcttcgcaaggtcgaagaggtggcaaagattgccctgccgactggcaagaaaacatacatgagtgcagagccggtctttgccgatccgttgatccagctgattcaaatcatcggtttcaagcatccggatgtctgtttccgtagcattattttccctttgatcaactcggatctgttcctatcgggcagagagttgaagatagaacagatggagccggagaaaatggttatcggaatccgcgcttttctggctacaatgtcggatctggagacaagtgaccaattatgccctccgatcccgactggctcgctcccgaatcctttcactgacgtctcaacccctgtgtatttccatcgaccccagctgctgaaagagtacaaagcgcctaatgcttctcagaagcaagacccgaccacatggcaacctgtcaataccgcgagactaagcgataatgtgaaggaatactatttccgattttgtgaagtcttaggcaagatcactttactctgtgataacacattcggcggccaagcagttctggacgagaagttcggcggaactacgcctaaaactccaatatcggaagctttcagcttcggtcgtcgtggtgatgaccatgttacaacactggaccagaagcaaggattctacgatttgctccatgtggcagtccaagcccttcctcgctgtctctctgaccacattccattcaactcactcatcaatcttctttgcacgggaactgcccacgtccagtcaaatatcgctacttcatcagcggagtcgttgaaggctattgcgcggcaattgcacgcccagcaagttacaatcggctttgctagattcatcttcaattttgatgagcgctactccactatgtcagacgaaggaatgcttggaccgggccatatcgagtccactctcagactatatgttgagttactgcaaatatggattgacgagattaaacaaaaaacaaaaggcgcggcagcgatggatcaactggagagatccatttctggcagccgagctctgcaccttgatttatcgagtgtcctcgcccatgtggaggagattgagtcacatggactctttttcttgtgttctcaatcaagacgtgttcgagcctttgccatcactgtcctgcggttgatcacggaatttgacagcgctctcggaaaagaaaacacaagaatcatccggatccttgaggctgattctcagcaaatcctagatgtgaatgatgagcatcttaccgtggcagagcgaagccgaatccaaaagggcagaagaagaagcgcctctcaaaatactcttatcgaactgtgcagcagtgaagtctcttatgattcaacattgtgggccaaggtatttccgaacatcatccgtgttagcttcgagacttgcccgttcgctgtcaccctaggaagggagattgtatgtgcacgccttcttcagatgcacgagattatcacgtctctcgccgagagcacaagatttccgcaatatgctcctatggatacgtaccagaatcgccccattgtaagaaccaatgtgacatctgaaatccttgtcgagcaatggaagctttacttggtcatggcatgcactactgtcaccagtgttggggctcaatcgcaaagccagctggcaaatgctcagcatgcgcgcaagacttccaagggaacccatcaatctcaagacaagatcagctccgctcgaagcctctttgcatttgttatccctctcctttctgctgaacgggattccatccgcagtgccatcgttgttgcgttggggtctattcatcaaaacctctatcgcacgctccttgagtctttgcagtatgccgtcactacttgcaacgaggaggcgaagatgagaattggcaaccactaccgcagtcctagcagcccccgccggaacaggaagactgatcgtttgcgcaccgaggtaacgaatgtttacaaactcacatctcacttccttcaagaccccgaggtttacaatgacgactggatcgtcaacaaccttgttacatacgcaaaagacattcgaattttcctaagtgatgccgaggttcagaacgactgggaattccagcgcttgcgattccatttctgcggactgatggaggagatctttgaaggtattaatcgtgctaaggatccttctcgctggatgcctttcgagtcgcggaagtctgctttctctcttatggaagactggtgtggatactcgccaaatcaatctcaaatctctgaaagagaggagaatatgcgcaagtttcgcatggcccggccacatgagactggtgaaatgaaaaataccgctgctgctatggagattgagaagaagaatctacgcgcggcagccttgagtgcaatggctttcctctgtgctggccccatcagcatcaccactgaaagtggttctgtcctccaattcgacgtcactcgcatgctttcatggattgaaatgatcttcaacactgtcagtgacaaatggcatgccatcggccgccgggctctgaagaacctcatcattcacaatcaggaacactcctatctgatggagcgatcaattgagatgtgctatgttaccgagcggcccaagaccattgagagctacttcgaagtggtgatgcaggtgctttttgaatatccggactatccactggaattctggagagttctaggagcagtcttggtgacactgggcaacgaaaaacgtgagatccgaatgaagtctgctaagcttctccgaaaacttgaggaacgccagcagaagaactccaggattcaagactttgatattagtatctcagacaagactaccgcagtgtacaagctggcccagttcgagatttcgaaaagattagctagtcagcattctgacttagcattcgctattttctcggagttttctttgcatttccgcgttcttggacctgatagccagcgaaatatggttgctgccatcctaccgtgggttcaaacgatggagctacaggttgacccgaatggcggccctacagccaagtcatacatgttgctcgcaaacctttttgagatcaccattcgttgcagttcagtcctgcctaaccaagtgcaagcactgtggcaggccttagcaacaggccctcacgggggtaatgtgcaactggtcctcgactttatcatcagcatctgtttggaacgcaaggagcaaaactttgtggattacgccaagcaaatggtcgtgttcttgtctgggactccagcaggatcaaaggtgatcgagttctttttgttgcaggttgtgccaaagaacatggtgcaagagcggaaagaactcactccacctcctcctgacatcgcaagtctgccatatgttgcagatcttggggtagtgctccctgtcggaaacaaacaagctggtctatcccttggacaggttgccctgatattcctcgttgatctgatggtcgctccggtgactctcgctctgagtgatgttgtcaagctgatccacatcgttctcatcctctgggatcattacacaatgactgtgcaggaacaagcccgtgagatgctggtacatcttatccacgaactgatagcggcgaaacttgaggacgatgccccggcgggtgcccggcaatcggtcgaagactttgtggaatcaatccgtaagagcgaccccgcggttgtttgggaatacgaagagaaccatagtaaagatgaagagatcgatgatcgccgggttcctgcatctatggctactgtcacccgtgaggtcgtcaggttctttagctttgcttacgaaggtgtcggcgatctgtgggccaaggaggcattgaactgggccacctcgtgtccagtacgacatttagcatgccgctccttccagattttccgctgtatctcgacatcattagattcgcggatgctagctgatatgctcgcccggctttcaaacaccattgcagacgaggaaacggattaccaaacattctcgatggagattcttactacgttgaagatcatcatcagctccctagcgccatcagatcttttggattatcctcagctcttctggacgacatgtgcttgtctcaacacaatccacgagactgagttcattgagagtattggcatgcttgagaaattcctcgaccgggtcgatctcagtgactcagttgtggtcgccaacctcatcgagggccagccaccaaactgggaaggcggctttgatggtatccaggaccttgtctttaagggaatgaaatcgtccgagtcctttgatcgtacgctcgatctgcttcatattcttagtggtcttccaaacaatgatctcatcggagatggaactcgacatctgtttactgtgttggctaacctgccccacttccttcaatgcttcaaggaagggttcaacgaccccaagcccatcgctcgtgccagcatacttgcccgcgtggctgagaatgagggatgccctcgcctcgcagcatctttgtttgggtttgccaatcagcagtacaagaccgccggggtcttcctcgaccatatcatcaccgagatcaagtcatactacttcccccagctggacttccagtgtctcatcttcctcatgggacttctcaccaacaccacggattggttccgcatcaaaaccatgaggatcctctgtgtgttgattcccgaggtggatatgcgacgcaatgaagtcacttgccatggcccagatctgatctccccactgctccggcttctgcaaaccgacctctgtcctcaggccctagaggttctggataatatcatcacggtctcggggaatccaatggagcgccaacatcttcggatgagtatggcgtcggcagcctcttctcgtgctatccgcaaagagtacgagcgaattcagagtctatacggaattcctgaaccgacgggatggtcggttcctatgcctgcaacccagtcaagcacgacccggcacaacgtccacgctgtcttctacacatgtgttgaagccgaagacaggcaagaggaagatgctaggacacctagcgtggccttccatgcggatgaatacagtgactcgttcttcccaatgagagctgatacgatgaaatcaatcgatacgcaggttgatggcaatatgggagatatcgtgcagaagctggacagcttagatgacttctttgaggatactgatacaatcactcctgtgctgaaccccatcgctcctccgatgctgcgaggattcactggtaactatgtggataccaacgcacatctgtatgatcagcagaccgcgccaattttgcgggaatcactcgctcggacaggttctacatcgtctttccataatggtcttgccgagtctcgccctcccaacatccgcttcgacggtccgggtgtgtactccccggtaacggcgataccccaaaacgcacagctactacgatccggttcccatacccgctctgtcacttcccctgccaacaacatgtatgcgcacacggcttccaatgcccccaattccacactgccggttgcattcggcgattccgctttactgtccgatgaggatccggacgaggtgcattcggacttagacgaacgcccggtaaccaagaagatgatcactccacctgcacccatgatccgcagtgcaactgatggaccacactccctggaatcaaggattcgcaacggcatgcggaggctgactggcggcgcagccaacagagaaaaagagcgacagcgggacctccttcgctcccaacaccgcgccattgtgcaaacggccaactcaccccgcgtccctaaggtacccgaggagtatctctcgggacctaccagtcacccggcatcaccgaggtgaggttggtacatatctttgcccttaacatacgtttctgctttgtcgtttcgctttttcttttctgttgtcagtccttttctaggctgcctgggcatttcttgggagtttggatcactttacatacataccccttactcgtccatctacttcgcgatcgatcttgtctatctagcgttgatccgcgcctctgcatcctgtacaatccatgtagtcagtcatatcctggaagttgatgggcttacatattaggtgtttgtcatttcaataccgaagtcaatacatttgaatttccaaggtcatgatgttgtcagagttcaagtttatgcgtctttatcaagaataccacgttgtatctatacattacgaagcgaagcgcagaacattaaggaggaccccctgccgagccgctataccgagaaaagttgccaactacgtccccgtgtatgcgaatgagttcctggcagttgaaacaaggtctgacaccctcttccatgtctctccacggagagaatcttggtattctgccgggcccaggtctttccactgcaaggaaatcccatacacgttgcggttttcttggaaaatatagcagtcacgaactactttttccgattcaggaaggaataacccatactaaatcatggagccgagcacccgtgttttcagtgactgtcgtcggctttctcccttcaagacagcaacgatttcaccgagcgtctccggtaaaagaatccgggccacttcttcagacatctggtagaccatgtagaatttcccactcgcctcaaaaaggacttccccccccctgagcatcgcacatgatagggatgcatttcccaagctcatatttagtagcgacatgatatccccaagaatctaccgctgcccattcaccctcgtagtcaagctcttccgggtccattgtccatcccggtggaggggacacctaggtacattatcagtatcacataatcgtgcgctcatctcagatgtttgacctacagaatattctctgcccaccatagcaatcggagtacggagtagtatggggggatctgcgtgatgtcaagccgggtgacccactcgagcggaatcttaattaccgccttcttaatggatgcaaccggcaattctgccaacatatcttccatggaatttatagtagaatcgaaattggcactttttcttatagcttcagggcaccaactaactgtggatgcgcacggggcatctttctcatgacaggcatttggagtacatcactgctcaatttgttattacctaggcagcactaaatcgagtacatacctagaggggaaaagtgactgtattatgtatatttttgggataattctaccctaagattggccatatcggtaagagtgactggaggtcgtcttaaacctaaaatttattgcttttcaagctatgaagatatactcattcacaattacgaggtctagatcggagaagcaaaggtccgtagtctttactggtccctcctttggagcccagaaagtcccttttgtcggggctggctggaattctgtctcaaagaagtcaatcttctctttatgtgccagagcaagatatcgacatttgtctcgtttttgtgggtcagcggaaactgtactggattggattcacaaatgatgcgtccggtagagcatgtagacttacccataagaagtttaattgggcagaacctcacttcatctttcacaatatctttcaggtctggttttctatagtgttgaagacctcgtcttcctttcgaccctcctcttttttcgggggatttgcatcaatatacaaagcccaacggagtacctttctaaatcaacgtcattcgcaggcatgcagaagaggttcatcgcctcagcactgaacggaattactacgccaaagaagatacgggatcggacattcataccgattaattgggaggcttgcatctaaaggagcgcgacactaaaacttgtgtcgcgctcattgccccacccaaacagctccagtgtccccactatccagtgtgtccttactatccagtgtgtccctactatctagtgtgtccctactctccagtgtgtcccctcctgcgggatcgtagacaatctataggttctactcctaagcctttgccttcttccatacgcggcattcttccatacggagatctcttccttatggggccttcttctatatgtagaattgatcattggaccgccaatctcagctatattctcgtaaagtaaattaaactattgggataatggttacataaaatctctgaccgaggataggaaaaacaaaggttctttcaggtaagagttccgcttcggtcttatgacttcatataggttgttgcggtgtatctttaccaacctgctgtacatcctggtctgtcactagcatcggggctggatagtaggagctcttgataggtcagtcatcttttcatcagagccatagtttgagacatactaattgtgagctgaggaaagcccagaatcccgaagtatccgctgataaaatatgtacctggcccgtctctcggatacgaattcccacgcacacatctgcgctgcacatcctactatattcgcatgcctttttcatcagacttgttttgcggcggcattgtttttgccgcatcaattttcttttcgaagtggtatccttggacttggtagccttgatagcggccattgggtgcgttgccttgatatctggaggtactttaacagtagagaagcctatataggtagcagggactctgaaaatttaggtccgctaatagaaaggggctcaatgaatataaatgttattgcacgaaggggagtctttaattatagagcgcgaaaagaccacgatattcaaagaccacgatattcttcaaattattgcacgcaaattggtcctttatatattgaactcataaaagtggccccgcaggacttgaagggcaatcaccagtgttatttgcggtcatcaaatgggtgcggcaacgggaaagcaaccgtaggcgcttatgtttacgtatcttgttcacattgcgcttttgcaccttgtaactattacgccaattccctatgtccggttaacaccgacggagtaaaaaattatcgattcataatctttatgataatggaatattcttaggggtctaaaatttcgggctatgaattttactatcacttgaattatatcaccttttaaaatttcgggctgtggattttacaatcacttgaattataccgcctcttaaaatttgcatgctgcaattttcctaaaggtcgaatattccgaacacaaaattttaaagggatcttttattcaggctcatttgaaattaccttcttaaagttcaagtcttattattttctcctcgattttatctacctgtctcggaaatttattatgtcccagttctaggaacgtcagaactactgcaaagggagagcgaaggtatacttgcaccatttccaaatagataatgtggggcctcgaactattcgagattcgcatatagcccggctggacagaatttttcagtcggaagggttttctcgcctgaacccagagaattatgtgaaggtccaatagcaatgatgttcttcagcaagctctgactgcccgatgaaactgaggccttcctaaacggcccattgaactttttaaaccccccaaatgaagtacggctgaatattgtgaacgatttatgttatatttgggcagttggactggaagcaaggctttttttggctggccctacaacggattatgcggatgaagagtcattagaatcttttctggcatggatcgacaaccaaagagccatgtgatactttctcagagaataagaaactgctacatagcagggcggtctatgtagaaactgctagataggagggaagtctatatagaaactgctacatagcagggcggtctatgtagaaactgctagataggagggaagtctatatagaaactgctacatagcagggcggtctatgtagaaactgctagataggagggaagtctatatagaaactgctacatagcagggcggtctatgtagaaactgctagataggagggaagtctatatagaaactgctacatagcagggcggtctatgtagaaactgctagataggagggaagtctatatagaaactgctacatagcagggcggtctatgtagaaactgctagataggagggaagtctatatagaaactgctacatagcagggcggtctatgtagaaactgctagataggagggaagtctatatagaaactgatagcactctagaagcgtagcgaattgccggggcatcctagaggcggtcggcagaatgcacaaaagagcccaatacagatagcgactacgaacataaacgcatttgagccttcgagcctttaatcagacacaagatataaataaacttccggcacagctttcaaatgacatataacactaagtaggaagctcgtgggcgttaagccgagttgtggtgtctaagcatgaggaagagaagctcgcgaccaatggtccacttgtaaaggagaagaaccttctatggatagcatcctaggtactcatgagatacccatttcaggacacgcatagacctatgctgcttgtaccaagagcatgatacagacaagacgtatggtgccccgaaagaattctaacagaagtggtgctgggatgaaagacagatcttgtatctatgatggagctatgtagagtatcctgtagggtgtgaaataagaggacgttaatgaaacaccactgctagttggaccatttcaagagcaaggtttccttggaaggccgagaacaaaagacttctttcgagagggttcaggtcatgggagaatcctcttgagaggaaataagtcacagtacggctaactgaagagcacatacgacacagaagggtaaacgtcatatgagctgggtcttcatgctatttctctcctaatccaattgttctgggcttgggctggttttgagatggtctagggcgaccacgaattgcggatggcggtttagccagacgccgttcagtgaggattgcgttcattggcttattatcttgctgtaggagcgggtctctgcagtagctttcattggacgacagtgtatgctgcggatgctagacccgcgttctcgtttcagagcctcagtgggcgcttatatacagccactgaaaccgtcccacgacgaagaaggcggtatcaaagggtgttttttttggcccgctctctgacttgactcgttatctcagtcaccccaccttctacttcccgctaaacgttggtacatacgcacagccgaatagcgggcaggaagatggaaagctgcttgcttcagttcgtgggggatcctgaaacggcgcccagaaatgaagttgtttggagactcatcaccagactcgatggagccgcctacgaaccgcctattcatttgtgggcaaagtgcaatccacccttcgtctcaacaccctgtatgattatgtctgctcccccccttcagacccattaagcctctaataacaactaacaaagaagcagtagttgatcaatttcaaaatgaagcatcaaaacaagatacgaagacagtccactgcctgcaaagaatgtcagcgtcggcggacaaaggtagggaatattacaatagtatagatcttctacttacttttcgttaaaatagtgcagtggtggaaatccgtgctcggaatgcacaaaacgcgactgtgtctgcgatgtcgatgagaactctgataaacgacgcaaactctacttaggtataatggaagaacttaggtaccatcaacaatttatggacgggttttttgaggcaatacggacttctgatgatgctaatgtccaccacattatcgatgttgtgcggtcgggatcattgaccagtgagatacagactgcagtgaatcgcattcttacggataatcgttcttcctacaatgacgtccctgaaggaggtccgttaagtgaccggcccaagaggaaggcttctaaatcggctacgtcggattatctcatagcccagctgctggatccaagcgaaattcaaagtgatggcgactcagcccagcaacctgttccgtaccccacgagctatcgcgtgctaccaaggaatatctcgagaagtctgagaatacagaaatgctttgcgaatgaggagcttccagatgatgttcgctttcagatgttttacgacgccggatatgttacgcgctactttggcgctattcatctaaaagaacagtcacctcaactgcaactggaggcatccttgctacataagatggcgttccggcgccatgcttttgatgtgcatcatgtgtgcagtcagtcgctggcgttgctcgaattcggtgtaggaacttcaaagacaagaataagcaggccatggtctcctgagcggcagtcaagtagggagatccggataaatataggtatacactgtcggcctcgttacgacactacttgatgcctaaccaattaaaaattggcatgaagcagactttcggggaatctcagtcataatatataattatccactgcagagatgctttcggagtcggctagcgttcgaatgcttcttcgcacagaaagggcatactcgcatgcaggaagcgattctgatctctgcattttccttgggccaatgctggtagtctttccgatgcgcaacacaatcgcaagcagggtgtatatctgtcgtattttccatgtggctgtcacgactgagaaggactgggaatgattggggacgattgaggacgattggggacgattggggacgattgagataatggctctaaagagcagttcatgcgataaattttaatctagtaggtgttaattagcaatatcgatgataagaagctaataaaagcacaaacggcttcgttcacaccgcgtatttgcgcaaactatcgcgtctatatgcagggatgcaggagagcagtgcttctccgcctaccctattaggttagattgtatttttcctatctgtgctgtagtcaggatacagtcactacgcaaaagtgttagcaccccagattctgccagtaaatattcaccaataaagggctaaggataatagacggaatatcaatttaaggaggcagtataataaattaggaaggcggtagtagaaggggtgttaatacttctgcggagtcactgtaggttaagaatccagacaagtgttccgcttccgaagatccacccccattagttgcccacgcatgctcgaattatgtgtgacttgataatccttgtagaccgttagatacgacacagcacaggactacacaacaattcacagaataacttcgaaaaagatggaatacaatttatgcgatagggcactttgaacattctgatttaacgtgctatgaaatatctggagtctctaatgtgaccctcacataaaatgtagtcaatggtacaaaatgtgcctttgtcgctgaaaggacaccatcggatggttgaaccgcctgaagagttctcaccgaaaccttccaccccagacgcaacttctttctatgccctttgtggattagtttccacttaaaggtagacatttgagtcatgactggccaattagtgaagaacaagttatcataaatacgcctagctacgtgtagagtaaggttctgggtaactaaatgcttccaagggcatcactggccagccaacaacctcaatctccacatcagtctgccacatgtggccgaacccttcatgattcagattgctttcaccaaagccaagagctcgccaaagcttgatgcgaaatatgaaacagtcagtcccaaactcgtcgaggtcataccagcgatcatctgcagagtccgcagttgatgtgtttgtctgcgggtcctccgctacaaagtcaggactagaaatgtcattcgattcgtcagtcatgtcattcgattcgtcagtcatgtcatgcgattcgtccgtcatgtcatccaattcgtcaggcaactcgtctgattcatcatgaacgtcgttatcctctggcaaacttccatacatattctcatccccagtatacaatcccatacaatagatatctgccgtgcatgggagagtctgaagctttgggaatactcttcgccactcggtgacaaaatcttgcatttggtctgactgcattagtacccttggttgatcgaaccagacgcttctgaggcacatgattttcaagttggatagtggacgcgcttgatgcatcagcaaaagagaaaggaacaatcgagcctccggcaagttcaaagaaacgagacgtggacagtaatgcgcgagatcaggaagcattgcaccattcattcgatacctgagccccaacgtaagcaattccacattgggtaatgcacgtaagagacctaggaactggggctgagagaggttttggtcccccatcctggcagatttatcatacacttcaaactttcgtaatagcgggcaacctcgcgcaatcttgagtagtgcttcagcatccgctagggcctcaaaggtcacgtcaacaatctgcaagtgacgacatttcgaaatcattctgattgcctgtccattgtgggcaggagagatatggtgcaaacagattatctgaagtttttcaaatctgggcaaatattctaaccaattttcatgcccccgtctaaggtggagtactttcaaatctggccatgggttttgagccagagatatcgatgcttgacttggatcgcagaaagttgtcctaagtgccagtgtttcgaggctcttctggtactgaaggtatggtaaaacttccccgagacttgattggacgggattgtttagccctcttggttcttcaaattggaagaaatgtaaattgcagtgtttcaggaggacacaaagctcattgaccgtttgatcaaaatcagacttataaattgtgagagccatgacattggcaaatttgttctattatggtggtaagtcatctttcaaagagctaatagggcgtgcaaaccaacatcaagtagggcattggagtgagccatcaaattcttgcagtaaatgttgtcaatagccaagtactccacagtgggggaaagaagaacatcagatatggatgaccaatcttgatctatgatctcgtatggaattataagactctgaaaacctcttccctgtggccgcaagagaagttctgtagattgccgatgacgcagcatgcgaggcttttcaaaggatgcaagtcgagtaggattcgcagcttcatccaacgccggtgtttctggcgcaagtaaaagatgtttgacaaagctaatattccgggcgaagcgggttcgcgacgctacatacaagctattcagtgatccaataccaggtgtacggagctgcatatcattgatggagcccgagtatagtttcttgagagcttctgcactccagacgctattgacacaagcacagttcaggagatctggagccgtgtgaacattgtcgatgacgagtgacatgatttctgggaggaggaaaggattatttacactgctttgaaggcatgcagccatggcgtatccataaaacgaaaaggaacggaacttaaaacgataaatgaaggttctcactcggtttgaaacaagaacgggacgtccccgaagataacatcacggtgtgaatccggcgctaactaaggaatattgatgactaaccttgtcaaagcggggttgcactagcctaggacccagccaaaacctttacgatgtcgacagcataacctcgtgcggagtccgacgcttaactacaccgatccagggtcgtgaacttagtatctagttgaccagggcccaaatattttaatctgtgataaaaaaaggtcgcgagcttaaaaattgtacgtacagtagcatcgccagttcacatatttgttaagatcagtgattggctggttgttttattgttgttggttgacttaatgagtcccctccactactcacccgccagaaccaggcgctttcccttccccgtgcgcatttgctgaaatccgatttacaccgaagccatttacccccctcatcaactttcaaggcgtggaaaaattctagcaaagtgacattcattcaatatctctcttagccatcaatcgatgagcgttattacccctgccaagatctcatcagcaatcccgcccgccataaatggaatcaacttatggcgtttgagatcccattccagaatctgacatacagtatccttgtggagagaatactggcatttaagtcgcctcaatggtatatgttgaattcatcatcgcgatactatcctgggtacgatacttctccccacctttgttacaatgcatctttttctttggtctttgcaacgctcaacaaattcctaggatactgtgtaaagctcaaaagcacctgcgaaacgatgtatttcgtaggggctaggaacaaagtaaaatgcaaggccattatttgatggccccacacatgaagaccccaggcgagacaatgtcctttggagtgaggagctcgggcgtgctctaatcatcgactttcaccgttctaccctgacatgtcgaccggctaggcagcgaccgggggccgcaaaacgacgactatatcaagtggaggcaggagatgcaaagcgtcttcgggtttcgtgataagaaaatctattttctacctgttaaattagcgattttgtgactcaaattctcatggtcacctatatatttcgaggcgaggtgcgctccttattcatgtgcatcaacaccacccgacttattatgtgagccggaccctcgaacttgagaactttttggaatgatatgaccattataagagcatagcagactgtcattcaattctgatattgcgacaaatgcaacagctgactgtataattgagggccgtttaagaggcccactgggagccaatctcaacactgcttttgccagcacaggtccacagaactgatatctctcataaatatggaagttattgcagtccagcattggccgcatgatgtaggatcgaccgaggtcaggcgagtgtggggtattttcgctattggctcgcatcgccgtggtattctttcaagattcacagattgggtgcggagagaccggagaggccaacgatgtcgacagatgggaggtcgaggcattcgcgaacaagcggccgagagtagatctggcacgccaagggctgtgcaatgaaacctctggtggggcctgagatggggcggatgaagcggagcattcaccaacaaggagaacaatttgggagacttcgcaacaagcaagggaggtcagcggaataacagacacccaacgggaaggcctcaccagcagaaagaaagcggtctagatgtctttgtagagttctttggaaaatggagtattgacacacaattatgcgatgcggtggatggctagatcaccccagtatttctactcctaagcaactgaatagcattacagcccacgctggtcagaacgaccagggagtcggatcgatctgcatctccggtaaactgaaaggggcagtgcgtcgggctgaaagcaaatgtgcagtagtcggtgggggccagagtaaaagaaagggggcggcgatgagtgcaagatagagaggtaggaagaatgaaaaagtgagagtaagggaggaggaccagtgaagacgggtctttatgtcaaagagcattgaagggaggttatgtgatggcgtattgaggcactaagcctaaaaaggcaaaactaaccggatagagtaattcacgggtccgccgtttacatgcaaaaaatgcattaattatgaagtcacggggaactggcatgtttgcactgtttatcaaagaatgggcccccaatgggcccccacgatgggccgtgggcccaaaaaaaaagcccaaagcccatcgtgggcccaagaaccgggcccaaagcccagcccattcgtgggttgggctgggttgggctttgggctttgtgggttctgcggaagcctatactatagatctctatactagcagcttattagctaaaaacactattactagtaccttttcaccggattccttgtctctataaaaaggaatcgcttctttctctcctctctaggaaagatttcctaacaattgagtatatcttcgcgaaactacctctatttcttaatcaggatattacctgatattatatgctctactatatagtctattttactccggcctactagaccactctttactcgttctctaggccctagatactttatatattttacccttttgcctgtcttttacctgttaacttaatgatagagtgctatatttttttatattattactagctttataggaagctctttcgaaagagatagatgatctcatgaagggtattggaaggtaagtcctgttattggtgggtcacgtgacctgtctactatttttagatacttgcccatctatagcttctcttcttcttcccttctctctttacacatatatacaattcctgtatagcctcattacgttccagtaagaccttctaagacagtgtcatcatctcgctccatagatgcaatttaatcttcaagtagattgtctaaagctgacacggttctttcaagctgacgacctgcttagcgattgactattgtattatacgtttgttagatcgcttttagagatcatatcgtaagaaatctaacgggatcccttcttttatctattatacgggcgaaaatcacggacgaaaacacctattaagtcttaggatcagactaaatgttaagatatataataccggtccgatattgcccagcttcatgctaccggcgatccttaacgatgccgggctcgggagtccttcagggcttcatatccgctgactcatcgggttctgactaagcggaccctgatcaaacttaattgaaacatttttaattaaaatctctcagggatcttccaaagtgaccgagtagacacagccggaagggatgaaggatccgtcgatttggctcaagctaaacaaccaagtttcacaccaattccaatgaatatctatagatccacattggtctcatttttttcaaaaatgccatgtaacaattcatgaatgtcgtataagaatatataagtgaccggctgaaaattttctggatccattccttgacttcgttctaaagttttaatattggaaaattccgtatctatatatgatgtctgtgtgagccatggtgatgactgtgactccgcttcgcagtgacaaattcaggctctgtactatcatcatcatgcgccaagccgatctcgttgagttgatcggccatctccttgaacggactatcttcctcgaagggatcgtcgctaagtgtgacatctgagtcgaggacagtatttgttagtcatgtctcatcaatcaattggttttgatcaacttacttgtaaccacccagttgtcagggtcattagggtccaaacctctggctgcgatggtagccgggggttcgaattggatcttgcagggcttgttttccagcatatcgaccttaagcgcaccaggggccttcttcttgtaagggtacacgaggcagatgccgttgttggtcagtgaaagttcagggtttccctggaggttgataccacccaaaacatggaggagtcctgtccctgggttcatggaaggattgttcgtggcacctgaggaaaatataccacctactgtcccgaggttgttctgggtgttcgtgtagctgaaaaggttcatggtgtagtatcttgtcggccctgtccatgacgagtccttccagtatttcgatgcggtttggcccgttggctgattaattagtaaacatttgatagatgctgccaggtacaaaaattttgactcacggtgtacttgatgtaagaaagttggccattgatcttagcttgatacttctgctgaccgtccggaacacatgcgacctcctaaaggacatcagattagttttcacgcaacaagtttcaaagagaataagatcagcttacagcgcctgtgcccccctctgctgctgagttgactggacgagtgtcgtgtcagtagatggccttgaatcaagtggatccagagtgcaatgttgacatacagggaaactcatcacaggacatggtcagcgcctggggctgttttccatccttgggccaaagggacctcttcaacttcgtacattccttcgatttctgagtacatgcgtcgacccggttagcatgcgttggatccggctgataggtcaggcgcatccaattgggccaaacatattgcttgcccgagttccggtccaggtatttcttgacattttcgcaaatgcccctgagatcgacgtgaggagtttgtccatttgtgtcagtgttgaggttgttgattctcgttgttgggaaccagtcacagttgtaaaacaacgccggtgggaggtagcaagttggtgcggtgttagcacgcttagcagttgacgaggtgtcttctgtatccaagcaactcaaggtttcgttagtaagttgagtattcttgttggcacattgacaccatccactaaagaaaggtgagccagttgtgtttttgaccagagccgagcttgttgaatcacgcttcctcttttcatccacatcactcgagtaagctagacattttttgtcaacaagtgcgatgggatcttctggagaggcgatctcatatcgatcaccccagtatgccacgtcgccaaggaatctgaggatttatcagttagcactgaccgggataaccaaaagccttcaagtagatataacttacgaggcatctgcttgcagaaataccgaataatcgtagtctgcccagtagcagaattctgcagaagacccgctcgatagacctgtcgacgccgaagcactaacacccaaactgacagtgttctcgactcccgcggtaaaatagccttccattaactttccattcagaacagaaataccgaatttgacctcaggggtaagagtcaaagccaagttgcccgatgccgacgctgaagcttcgaactgaggtgtgacggagaattgattcggggcatccttgccatcctcgtttttgagagaagacgggggaacactggcatcctcaccatctgaatcttgtgggaagaacacttctgctttagggaattccacaacaacaccagcgttaagttcacctgaaaccaccatcgaggcatccattttaccggaaagggcgagctctgggccgatgctgataagtcccttgatggaaagcccagggaatgtcacaccggagataatatcgatcttgtcgctgctggtctggaatgctgcttctcctcgcatggttagaagaatctctgctgcaggagcaaccgaaaagtatgcataagaagaaatcaacttgggagtgggcaaaatcgcgccttcaaagtagtacgcgtattgcgcattgagacctatatcgagagtagaatcgatgtccagtgacatttgtttgccgctgcacttctcatcccaatggaacaacttgatcgtgtcatagtagttcagaggtaggtatccagagctgtttttgacaattgtggtgactttcttcagccattgcttgaaggcgccaaaccatctcttcctcttctggggtggatcctccgtaatatcctccctaacgacgatgaataatgttagtcgcgactaattttttttgacagtgagtcaccagtcatagcttaccagtagtcaagcaaattcgtatagtcgacccgaaagttgacgtctcccttctcctcctccgaagcggaagccaggtcataatccacagtgagttcatacgcctggtttgtgtcccgcggtaggatattactccgcttctctgaagagtgctgtggaaccaagctgatgacacgagcgtagggtccagatccgtggtaagaaggcatcttgacaatggtgtttgatgcaccaccggagaaaatggtcttacacccggtatcttcatcgaggctcgcacagcgaataatgtaagtctcaacgacgttgtcaaacgtgtcctcgcggaatgtgaagatgtctcgcttcttgcgtggaccgccatctctcttggagttgagacctccatcttccaaaaatgtccactgatccacaagagactcgtcgtatgcatccgtgtcaccatccaccatcacaaatgcgtaagggttctcttgctcgaagtcggatgattcgttgttgtcggtgtcctcgtgcttcaggtaatagctgtagtttttctcatctgggtactcaaatatggcggaggggtcgacgggagggttgacagttgaagtaggtgcatcacagcaaaacttgtacatgcctccttcatggcaatattgggggagactgccatttagtaaagctgagcgttgggtgaggagaactttgtcactagcgcaagactcggtacaagtagtccattcacaattctcgtaaccatcttgattcgtgaggtcccattagcggagttgctgcgaatgaggtgccataacttactgtcaaatgggcagcaaaaggtcgaaacctcacttccagagcagtactcagagtcttcgttgagatctaaaattctgtcagacgttcacattcctcttcaacgtggactcggggggaggtaagggggtgtgatggtgaggtgtgaagtgacttactagtgccgggcttgagagcatattccgggtactcaatatcagttttcatgcattctccgttgcaggcggtccagaaacacgagttcactatagtgtcaagattggggtcggtggcacagcaaagcgatcgactattgaccatgcacggggtagaccctgtccggtcagagtaagagtccttgacaatttcaaattcatttgagccacatgttttctcctttccaccagtacacatgccatcggatgagccgccagtccactggcatgtcggcattgcatctgttgggcaacagatcagacgatattctgagtctgaatcctcatattcggtcgtatcgccagttttgcaaagatgatcatcggggtcaatgatggttccgtaagaggctctgtgaacgtaatccaaaacactgtaacccgctttacatgatccagagttatagtccacgcatccagtgacataacaatcagtaccagtatattgattgtatgcatgtgctaatgccttggcactcagtgagttctcagatcctccttctagcagggaagcggagctgacatctttgttcagcagggcagttaaagcttgccagtcgtatgtatcctgatccaaggcccagatcatgactccgcctaggcattgatcattggcccaatcgaccttctgcttcattgtgacattgttgtcgtacgatacccactggttgtcgtcccaggtgacatacatgactgctgcagtttcctcccagatgggaccctggacatcaacattctcgacgatctccatgatctcattatatgagagaatcccagaagcatctgtacatcgaccaggctgccctcctccagtgaaggggcatccgacgccagtgcatgaagagtccttgagtgtgaaagatcgaccatagaaaccaatgcccaaaacaatctttgatggatcaacattgtttcgccaaagaaggtccatggattgttgaatctctgtcaagtttgtgtgcgctccagtgatattcccaatgtatgggtctgtgccatcccagacaccgtgaagatcgtaggtcatcatgttcgcccagtcggctccgtcttcttgcaaataggcgggcacgtcaaagtggcggagataccagtagctcgatggaatggtgaatgagattccaaggcttgaaccactgtcgtcaaaggttgagcgaacttgcttgatcaacttgccgtagttttccatgtcatccttgctgccaccacgatccgaagcgacaggatactcccagtccaagtcaacaccgtcaaagccgtattgctgcaacgtccgcaataagtctttggcgaatgactttcggccagattcagtagatgccatgtcagaccaatagtgcgccgaatcaccgtcattgaatgaccagccgccaacagacaagaagcacttcaaggacgggttgtcatctttcaaagcaatgaaatcagccaccatgtcattcaagttcgatatcttgtcctcatccatcaggtaaacattccagccatcattccagggtttgaaaagagcaaacgaccaatagatgtgtgtcaggctctgcacggggagattgcttggagaccatgaatcacatgtccgttcagcagaccagctctcataatagccaatgaccttcttgagaacgtcgttcgatttgcaggaaggctgcgttggttgatagcaattgctttggcacttgccgccgtctgtaccggcgttgcaaaactcggatgttgtaccgcagaaaccgaactcggagcagcaaacattcaatgggcaggtcgtgccagcagtggcagcccatttgccgcattctgcagttgcattgcagttgctcacgcatgtagagccacaagatttgtcgggatcatagccacaaagctgtatactttgggtcagcgaggcttaatggataagatagacaggcttaactaacgccattggtttcaccatcgttcacaccacagcatgcaccgttgacacatggacttgtcaagttgcagacatagaactgggccgatgtgaaatttataaagagtgaaagtataataaaagaaagtagaaagaaagaatggcaggacaagaactccgcccgcaaactgtatatcctcatggtgcggctctttcgtccgaaatactgaacaagtcagtaaaagcttgcccaggacgattcaagtcaaaggagaaagagaatgaatgagaaaagtaagaggaactaggatcataaagataacagacggggtccgaaatgaacagccgagactacctaagctcgcaacagtccggcagcctcaagtatccgacgctgatacagttcagtttggagtcccacaagtgtatctactaatctaatctactaatttaatccctcagcgcacgcaatactatttgtggactagacttgcaatttttactaggctagtcgtatctcgtgagaaaccgaatcccttcagagtttggaatggtcaatgtataccctgcataaccccaccggtgtactgtactagtatctcctatgggtgccgaatacatccggaccacctggtggcgccttaagttggccccctggttccaagcctcctgttacactacttcgtagcttcaaatcttgtaagcaatcacttcaaaaattttcatcggcggggcaaggcccggaagtttcagctgtgcagctcgcttagaacaaagcctgcattcaatggtttgtgcaatctctacagaatgcatccgatgtgaaaggtatactgttaattcctacattttacttggcattagagccgcatctgcatcctagcaagccaagctatagccaagaatgtaagcttcagccattgatctgtttgtctacaattcttttctatcgtctaagtccattattcttggcggacccatgtgaaaattttggcccccttggcccccaacatggggccctctaacacgttcaggggatctcggcccctacccgctaagtgggactggcttcgggacttgatgtatagggtaaagcttcacccacttttccacttgaatgggctgtctagtgctcaagccgaaccactttttcctgtacctcgcttagtggatttcgacggatgtctcagatttagcttggtactttgaacttccaatgggcctccccacttctagctccttttgataaggtggtaaattggttggtatgaaggcgtcaatacgaaacaccgaagtttccctgccgaacaagtagtttgagtagccattactccccctcctttgggattgctcatgtcccaggttcaaggaaaatcaattcgcgctctgaattctctttcagtcatagagctatggcactcttgagggcaagtgctgcattggcagtagttctgatgctacagtctcatcatgccgctgcttggggaaattcagacactctctacatttacaactctgatactctggctgatatatcagcttcagaagcatgcgtgaatgccatgtccagcaatgtttcatgctatgccggcttgagccaggcagtcacccagacgacatcatggtcagccaatgcactgtcggaaatgtgtaccagcggttgctcttccgctttgtcaagctatgtctcctctgtggacgaagcctgcggcacaagtacgcagtacaacatctccggtatctcacaaactgcctcggatagaggcaaagaaatgaaatggcgttacgatgcaacctgcttgactgattcggcttcgggcacctattgcaacaccctattccaaaatgcaatttcgaatggcacaacaaacatcaaatgcagcgcatgctatttggagtatttgtcaaccctagtgaattccaaatggggtcaggatattttgctcagtccgtcggccttaacgagtcaagtatcttcttgctcgaccagcggatactctgtgacttatacaccaacctcgactgcctcttccacggcctctgcctcggccactgttgccgctagtcgctgcaacacgactgaccccgatcaaactgtttacaaggttgaatccggagatacctgtctttctatctcagcagctcaaaatgtctcaacctcagccttgataaacttgaacagccttgatacggggtgtacgcatatagttgctggggcagagatttgccttcccgatgtttgtgagatctatcgcgttcaggagacggataccattgacaaaatcgttgcgagcctatcgcgtcaagtctctgtgcctcagtttgttgcatggaatgccaatctcaactcagcgcaaagctcgcagaatctgacggctgtttcggggaagtacatctgcgtcagtcctccgggtactctcacactccccgataccctggctcttaggcccgcaagcaccgctgtgtatgttgtctgctattttgtttcgctcggttgttcggaaagtgaaaatgctaatcaaatatacaggtctcttcctaccgacgcagtcactagctccaacaccgactgtggtcactggtatcaggtccaagatggtgatacctgtgaatccgtgtgcgacaaattcagcatctctcaatataatttcaatttcttaaatccccaggccgcattgaatgcaacctccagttgcggcagcctctggaaagggaacagctacgtacgtctctctacacgagaaaataaccaagacatatcgttcttttcaggctaacccatccactccacagtgcgttcaagcagtgggtaacatcaacacctatacaagctacatatccaacaccacaagaacacgcacatcacttgctagcaccatgaatctcaacgcaacccgaacagcaaaccatagcaccaccaatctgttctggtcattcccttccgacctaaccacggcctcaacctggacccctgattcagcatacctcgcatctctcgcgacctacactctctgcgaccaggtcaactcagtgtacaacatcaccgatgacgatctaacagacgagatgtaccacgatgaagtctggctaagtgaatacgagcgcgtgtgctatcctcccgtgaacggttctttcccgaccaccgggttcaacttcagcattacattgaccgatgatccaagtatgggaagctcgacggtattcacttctagccaaacagctagccctcacgcatcatctacggtcactacggcgacctctaccacagttgcgactcctacgagtacgatttcggagaacggtctctgtggcccgtctaattcggactggacttgtttgggatctcaatttggtgactgctgtagtaactacggttattgtggtagttcgtcggagtattgttccagcgccaattgtaatgctaagtatggctcgtgtggttgatcttggtttgggggtgggacactcaatgccctagagttctaaagttcactgtcggacaaaattcggctatggtcttcaaggcatgtcaaatgtttatatatgccatattttcttctagttttaattactggaatatagaactgggatttaccagctggctgttaactggcacatagtagtgcatggaaacctggaatttatgaatatcaaactttcgcttacatttcaatgattttggcacaaatttacaactttacaaccagaattttgaaagcaagcggctaggccggaaaagacgctacttagtgcacaccaagtttgtgatcgatccacttcaacgaaaaccctttaagccaaagacccactccaggggtgtatatccgagctcgcaaccacttaatctcccctatcaaagcttagtcgtaaagattccaaggtcgcataatacaggtttagtgtgtttgagatgagtttgtacaggaacttttgaaaatataactagatttgatgccttagtgcaaacttggggcgggcatgtatcaaactccgttaaatacattcccgccccccacgttcctcactaaacttcttttcaacccccggaactaccaccattcgatcatgtccttaacaagatcacatagccagtggcccagaggcatcccctctttcattcgccgacatgaggaacccgtggcccggaagaattttgatgccgcctctcgtgcatggaggcattttgttcgtgagcagtgggtcggtggcgacggcgcggatcaacagaaacgagcgttgatcgaacgctgggcaacagcagaccaacaattccgcgatgtatgtcttttggataagaatttttatttttcactgacaccatgacagagctatcaatcacgagccccagaggacgagcctagtttttttgaaggtcctgaacttacggtatgaaacaattaaatatatcctactacctgacttatcctaatccaagtataggataaaactttcggagccaatgacgttcaaagttcctgcatggtctacttctacaccaccgaattaacccccgagaaagaagccctgctcgccaagtgtatcctgggattattcccatgggaagacggctgggactttctagcagacgaaatgatagtatttgttccccctgaagacaataaggggaatgttctcgagacatttaaattccatcaaagtgtcgcgcgacccaacttcctcgatatgcacatggcgcttgatggaactgtacttttcagagactgctcccccaagcttattatcgatgaccggacccttgagaccggactaggtctctgggttgattttacaaccaacggtatctacgagatagcccgtcggggtcaaattatgatggaggaattcgcctacttttatcgggaaatcggtccgggaaatcgagtcccaatagaccaggcgctcaattacattgaggaccgggaaatttacatagaccgcgacgaagatgcagatccaagagagattttggaggatgaaccgtgagtctgtccattcttggttacgagatggtttatgttaattggtgcttagagtcgatatgcgacggccgcttgtggaaatctacaaagggaatgaagtcgatctggtggatgactatgcgccaggatttcgcgaggcggaggagcagggtgacggtttagcgatcggatttgatttggaaaggatacttgcgaacgatggaaatcccctgattgtcagagatcatggaagtgaccattagctagactttaccatgtactcctgaagtctcgttggttatttatatgggagatacggagtacataactggcaaccaccccttacctccggcagggatggagatctctaccgaatataccttgcccacggagcctccccaaagaatcaataattgggcacttgctgcaggtacccgtggactacagctacagtacggggtacggagtacattctcataccccggagcgattgataacatactaggtactatttatattgtaatatttcagctttttataggtagctgtaaactatttattatatttaaggtatatcatagtctgtttgttaggctggtaaagcttctgatattgaaggtccaagaaatgacgatattaatgataaggagaggaaggaggaagaagaagaagaagctatgaaagaagtaagctaaacagcaaggcaaacaaaacaagcaaagtgagcaaagcgagcaaagcaagcaaacagggcgcggggcagcaagcaagtaaacaaacgaatatataatgcttatagagcatgatactaccccctaataaagtaaaggtattagtcccttgatatcaaaataaccaaatcaattaatgatagtatgaattatcagaatcactcccttccaaatcaaccaatttagggtcaggaacaatagtagcattagtagtagtggcactaagagagatatctattacgtcagatctaccaccagagttactagttttactattttaactataggatataaagacgagatagaacttaatatttttaatactttattaggtaaaaagactatatatattctttagtatattctatatcgattataactataaagagatagcttttaataacgataaatagcgctagatcgactaacgtattcggtaagcgagctgcgcgcgcaaccgagctgcgcagcccaaaacacatagtaaatgcaagatattccacatttatatcttaacaaccatatgttcatcctatctccccgtttgtcgatagttattgataagacttcttagtactatatatcaatttcaaagagagtagaatactatcttaccatgatttcaaatattaccgaaaattacgtccctaaaagctagaaatatatatatcgtagttataaagccatttattttcctaaagttccctagatatactagatatcatatatatagtactatgctataaagacaagtccctatgagccactgttgttgagatatcaagttgtaatatatcgtatttactatgtgttttgggctgcgcagctcggttgcgcgcgcagctcacttaccgaatacgttagtcgatctagcgctatttatcgttattaaaagctatctctttatagttataatcgatatagaatatttatcttctttatcttataaagctattctataattatatacttactcttttaaagactcgagatataactatatatcttattttctagatctataatatattatttaagtatctagagaagtctattaattagctttaataaaagtatatactatagaaataataaatactttcctctcttaaggctagccgattaaagcttaataagtattatttataaataaattataagtatagttatatttatataattagtactatattagcgctagatagtcgattctaattctttctaaccgataattagataaaagaatagtataagatatatcgagctttattctaagatactcttaccccttactaagatcgttaagtaactagttaaggcctattagcctcttcttttagattaagactaaatatagttcttaataatctactttacgtaaagaaacctaaagcgaagccggttagggataagataacctaatatcttaatagtagtaagttaatcttattctaataattacttattacagagtacacaaagccgccctcaatgcttatattgaaacagatggctacggaggacgttgtatacagcgaaaggtcgacaggcgcgaaccaagaaatatcccgacagcatagcctctctcattggcgtttcttcggtcttccagaccgagagctggccttgtggcgtaatttggttgaatagtgaacttgaagggatgacatgtttcgacctgggaagtgagtcgtaatctcagactatgacattgcctctttttccttcagccgcacgagcagcgcattctcgtccgacgtgtatgtgtgtttccctgggataaccgccgtgtgcgctcgagacagcatcgggctaggatcgggtacgaaagtaaagaaatatgccggtttcagaccagtattagattcgaccgtgaggatagcactcccgcgtacaccctggatagcaccagagcaatgagatgaaataggaacggaagattccgaagggtcgaaaagtggcctgattgaaggtctccttttcttcctcttttgacacggctgtgctgtgtcataggtggtgttcccgtcttggtggatgctggtacctcgacctgagcggagtcgcttcttgcatactgccgcagcggcccttgtgcttgtcctggcggctccttgtttccaagacgttggcggtataaccacagctatcgacgggtagcgcatcgggggtttggaactcattgtcgttcgagctcgagaacatgttgatgtagagcgatccggaggcggagaggacgggctagatgtggctgacgtgtcttcagcagtgctgggatcttcagcccgccccgaagccttgtttgcccttgagcatggatcttcacctaggttagatgtctgactcggctccgaatcactttcgtagaccccactatctgagggctccatggtagataacttccgcttggctaattcttgccgaaaatcacccaccacagataggttgctagagacacagttcgcttattcgggtacaggcacggatggggtcacacagggtatgcaagagagttgagaagtctccatttctttggtatcaggaacagcgtctacaataaaaaaaagtcagacaatgagaggatgatggccgactttcaatatattgtgccaaattacccggtagaacatctcctcgcatatcaggaggaatagtatctaggtaatttggccctacaggacatagaattgttctcgcggagtctgtcgatagcactggctctaagaaagccagcgcggaacttccacgatccaacagaatatcacaggcagctggtatatctgttgtcactgggggtccgacatctttcgtcatttcaggcggagtgggtccgtagacatgattgatctcgaagtcaaacatgttccactcataagttgtaccggtcagtggcagtgactgtcctaggggtacctcacacggtcctagacagaagccgaacccagtaggaaaagactgctagaggtatcgtggctcatgagctggggcgtggttagggggcacgctttttgcactggtagaaagcggcgggcgacttgggccatggtagaactcgatttgatcaagatccaccctcatttcccagaaagtggtaagacacagcctagacacagcggaggtagaaaccaacagagaatgaagcaagcttaaataagagtacagcggtcactgggctagtgtatccacatccgttctaaatgatatccaaatcccttgatggatcaaagcttcaagactttcctagtcgataaatatgcgtatttagataattggaagcaccaattacaaaggcggttcaaattgcttgtttgattgggctttaggagcggggaaactagttgtacatgttatatttatgaaagcttctagctctcaatcaatgcatggaggatttgatttccagcgagaaaatgacaggcatggtttttccatcctaaagtttgttatttccagtagtgttaaggtatccccaatagactcctacgttattgtgcacactaaagataaagatcgcttccctaccatatacccatttatgatattatcatgccaaaaaacgccagatccagtagtgatataccaaagggaaagagaaatcgttggtgtctatggcaggggtagcccaagagcttgcaaaggtaagcaggagacagtcccatgcactctttctgcatggttcaggagtgccttttttgattctagatcttctccgcaaatattacacttgcagtgcatatcattcgggaacagcttgatatgcctattgacaaagtatcgattgagagaaccagggttcttatacattctcagacgctcattttcgggcagcccagaattaccaagacagataaagcagatcgttggtcgagacttttcagttttaacgcagacagaagcgatagcttgagaaaaagtatcgtctctattttctggaagagcagaattctgcctcttaggcatgggggcagcagcggctatgttacgaccccgagggtcacttgcacaactggcccgtatgggccgacgtacttgctaagtactcaaaatacctatagtagaagctgggtattatagggagatatacccctacctaccggctaagaaaactaaatataggatttataaacccctaccgagataggggctatacctactaaaagagctgctcctatagaagagagggctgcctaaccaatagaatcctccgataaggatattagagaaaataaaagaaggcttatagctaaatagcgagaccttaaggccctcgaaaaacagcttataattattaactagaaagccgaactcttactatacctttataactagaaccttatagctattgccttagaggaagaattaagtatactatacctactactacttaagggagatattacctaagtactagaatccctaaaccctatattaaggatactagtaataccttaaccttccctaatagtagtaggggactataataataatataggtatagtataaagtagtaaaacctcctaagttaaggaactataaagtctatctaatatactagtattctatagtaaaactatagataaataggatatatttaaggtaaaataagaagtattttaagtaagatacctataatagtttaccttagataaagtaagggttatataggtaatagaattcctcttaaataaggttacctagggttagatataatactaaaagaataatcctataaagtagattatataggatatattcgaaacttaggccttaacctaagttatagacctagtatagttatagtataaagtaaaagccgattaatagtaagctatatagaagctggaatagagtatatattaatatacctaatacctaatagggatctataaccacttacactctatactattagattaggtatatatcgactgcctagagataggtattttaagagagatctaaaccgaagcctaatagtaggacctacctaaaataaagatctataataattaggtagcctatcttagctttatagagagctaaatacctttatatactataaagctataggttaagcgatacctatataggtagaataggaatatagacttaaaggataatagtaagaagttattagactaaggctaggaactatctaccttataggatagctaaaaggagtagttattatcctctaataagaggaaataaggctaaggggtaaaattagataactagataaaggacttatattacttatataaggaagctagatatattataagaatttacctaaaagctaagtagctttagaagaataacttaaaggagctaaaaaaatagataaccctatactataggctataatagtactaggaataacccttagagagggttagtagaagggctaaagtatattagtatataatatacttatcttagatatttataagggtatcctaatagggattactagaattctaattaatagtagggctacttagacctttattagctaaagataggcaaaggagaatctagaagatataaaagggataccctatctagtaaaagtaattaataggtataaaatccacttatatagtagctaagagattactttctagcttatagatagtactagaagatatagtattataaagatatattataaggctattaatatattaggatataatatagtcttagggatagactaactctatatagtaaatctaaatattaactagagtactagctattagttatactataagggtaccttactagaaatagagatagtcttcttaaaagagtttaagaaggaactgtatctatataatatcttttatatactttatattagaccgctagatctattagaagaaggcaaatagttaggaactatatagatagataaccccttactataagtatatagagactttatagatatctttaataaagctctagctttaatcctactagaatatactatatataattatactattaacctaaagttaggaaaggtacctctatttaggttactatacttactatcgaatatagagttagaagtcctatatatctatattaataagaaccttaagagggactagatctaatatttaaagagccttataaaggtacctattctttttatactaaagaaggatagtaagcttcggctatatatagacttctatagattaaatataattattattaagaaccactacctcttacctttaattagtaaatccctattaagacttattagtataaaggtctatattaagctagaccttagagatatatactataggatctatattaagaaaggtaataaatagaaaatagtatttagaattaattatactataagggtaccctactagaaatagagatagtctccctaaaagagtttaagaaagaactatatttatatagtatcttttatatactttatattagactactagatctattagaagaagataaacggttaggaactatatagatagataactccctactataagtatatagagactttatagatatctttaataaagctttagctttaatcctactagaatatattatatataattatattatcgatctagaactaggaaaggtacccctatttaggttactatatttactattaaatatagaattagaagtcctatatacctatattaataagaaccttaagagggactagatctaatatttaaagagccctataaggatacctattctttttatattaaagaaggatagtaaactttagctatatatagacttctatagattaaatataattactattaagaactactattccttacccttaattaataaatccctattaagacttactagtataaaggtctatactaaactagaccttagagatatatactataggatctatattaagaaaggtaataaatagaaaacggtatttagaacctactatagatatttcgagtattatataatactatttaggcttataaatatacctataaccttctaagcttatataaataaggctcttataagattattagatatcttcctagtaatctacttaaataatatcttaatcttttcctaggataaggaatcttatatagaatatatataaatagtattagaatagctctactagtttaaactctatataaaggctttaaaatataccttctatacttcttaagtagagttccttagatttattatctctaataatagtatttctatagaccctacctaagtagaagtaattattacttagctaaagctagagtatatcttcgatatatagtaatttataggcttcgcgaacttttactataaatttattaaattatacttaaagattatagggctacttaatatattagtctaaggcctaaatatatagaagaaggggaagaataaaaagaagctaggcttctactttaataaaactataaggaaggctttttaagagattaaagagattttctaaaaagcccctttccttatatactttaactccctactaagaaccttagtagaatctaatatattaggtaaagtaattagagtaatctacttatagctataaaaagagagtagtacttagaaactaattatattcttcttatataagataagnnnnnnnnnnnnnnnnnnnnnnnnnnnnnnnnnnnnnnnnnnnnnnnnnnnnnnnnnnnnnnnnnnnnnnnnnnnnnnnnnnnnnnnnnnnnnnnnnnnnnnnnnnnnnnnnnnnnnnnnnnnnnnnnnnnnnnnnnnnnnnnnnnnnnnnnnnnnnnnnnnnnnnnnnnnnnnnnnnnnnnnnnnnnnnnnnnnnnnnnnnnnnnnnnnnnnnnnnnnnnnnnnnnnnnnnnnnnnnnnnnnnnnnnnnnnnnnnnnnnnnnnnnnnnnnnnnnnnnnnnnnnnnnnnnnnnnnnnnnnnnnnnnnnnnnnnnnnnnnnnnnnnnnnnnnnnnnnnnnnnnnnnnnnnnnnnnnnnnnnnnnnnnnnnnnnnnnnnnnnnnnnnnnnnnnnnnnnnnnnnnnnnnnnnnnnnnnnnnnnnnnnnnnnnnnnnnnnnnnnnnnnnnnnnnnnnnnnnnnnnnnnnnnnnnnnnnnnnnnnnnnnnnnnnnnnnnnnnnnnnnnnnnnnnnnnnnnnnnnnnnnnnnnnnnnnnnnnnnnnnnnnnnnnnnnnnnnnnnnnnnnnnnnnnnnnnnnnnnnnnnnnnnnnnnnnnnnnnnnnnnnnnnnnnnnnnnnnnnnnnnnnnnnnnnnnnnnnnnnnnnnnnnnnnnnnnnnnnnnnnnnnnnnnnnnnnnnnnnnnnnnnnnnnnnnnnnnnnnnnnnnnnnnnnnnnnnnnnnnnnnnnnnnnnnnnnnnnnnnnnnnnnnnnnnnnnnnnnnnnnnnnnnnnnnnnnnnnnnnnnnnnnnnnnnnnnnnnnnnnnnnnnnnnnnnnnnnnnnnnnnnnnnnnnnnnnnnnnnnnnnnnnnnnnnnnnnnnnnnnnnnnnnnnnnnnnnnnnnnnnnnnnnnnnnnnnnnnnnnnnnnnnnnnnnnnnnnnnnnnnnnnnnnnnnnnnnnnnnnnnnnnnnnnnnnnnnnnnnnnnnnnnnnnnnnnnnnnnnnnnnnnnnnnnnnnnnnnnnnnnnnnnnnnnnnnnnnnnnnnnnnnnnnnnnnnnnnnnnnnnnnnnnnnnnnnnnnnnnnnnnnnnnnnnnnnnnnnnnnnnnnnnnnnnnnnnnnnnnnnnnnnnnnnnnnnnnnnnnnnnnnnnnnnnnnnnnnnnnnnnnnnnnnnnnnnnnnnnnnnnnnnnnnnnnnnnnnnnnnnnnnnnnnnnnnnnnnnnnnnnnnnnnnnnnnnnnnnnnnnnnnnnnnnnnnnnnnnnnnnnnnnnnnnnnnnnnnnnnnnnnnnnnnnnnnnnnnnnnnnnnnnnnnnnnnnnnnnnnnnnnnnnnnnnnnnnnnnnnnnnnnnnnnnnnnnnnnnnnnnnnnnnnnnnnnnnnnnnnnnnnnnnnnnnnnnnnnnnnnnnnnnnnnnnnnnnnnnnnnnnnnnnnnnnnnnnnnnnnnnnnnnnnnnnnnnnnnnnnnnnnnnnnnnnnnnnnnnnnnnnnnnnnnnnnnnnnnnnnnnnnnnnnnnnnnnnnnnnnnnnnnnnnnnnnnnnnnnnnnnnnnnnnnnnnnnnnnnnnnnnnnnnnnnnnnnnnnnnnnnnnnnnnnnnnnnnnnnnnnnnnnnnnnnnnnnnnnnnnnnnnnnnnnnnnnnnnnnnnnnnnnnnnnnnnnnnnnnnnnnnnnnnnnnnnnnnnnnnnnnnnnnnnnnnnnnnnnnnnnnnnnnnnnnnnnnnnnnnnnnnnnnnnnnnnnnnnnnnnnnnnnnnnnnnnnnnnnnnnnnnnnnnnnnnnnnnnnnnnnnnnnnnnnnnnnnnnnnnnnnnnnnnnnnnnnnnnnnnnnnnnnnnnnnnnnnnnnnnnnnnnnnnnnnnnnnnnnnnnnnnnnnnnnnnnnnnnnnnnnnnnnnnnnnnnnnnnnnnnnnnnnnnnnnnnnnnnnnnnnnnnnnnnnnnnnnnnnnnnnnnnnnnnnnnnnnnnnnnnnnnnnnnnnnnnnnnnnnnnnnnnnnnnnnnnnnnnnnnnnnnnnnnnnnnnnnnnnnnnnnnnnnnnnnnnnnnnnnnnnnnnnnnnnnnnnnnnnnnnnnnnnnnnnnnnnnnnnnnnnnnnnnnnnnnnnnnnnnnnnnnnnnnnnnnnnnnnnnnnnnnnnnnnnnnnnnnnnnnnnnnnnnnnnnnnnnnnnnnnnnnnnnnnnnnnnnnnnnnnnnnnnnnnnnnnnnnnnnnnnnnnnnnnnnnnnnnnnnnnnnnnnnnnnnnnnnnnnnnnnnnnnnnnnnnnnnnnnnnnnnnnnnnnnnnnnnnnnnnnnnnnnnnnnnnnnnnnnnnnnnnnnnnnnnnnnnnnnnnnnnnnnnnnnnnnnnnnnnnnnnnnnnnnnnnnnnnnnnnnnnnnnnnnnnnnnnnnnnnnnnnnnnnnnnnnnnnnnnnnnnnnnnnnnnnnnnnnnnnnnnnnnnnnnnnnnnnnnnnnnnnnnnnnnnnnnnnnnnnnnnnnnnnnnnnnnnnnnnnnnnnnnnnnnnnnnnnnnnnnnnnnnnnnnnnnnnnnnnnnnnnnnnnnnnnnnnnnnnnnnnnnnnnnnnnnnnnnnnnnnnnnnnnnnnnnnnnnnnnnnnnnnnnnnnnnnnnnnnnnnnnnnnnnnnnnnnnnnnnnnnnnnnnnnnnnnnnnnnnnnnnnnnnnnnnnnnnnnnnnnnnnnnnnnnnnnnnnnnnnnnnnnnnnnnnnnnnnnnnnnnnnnnnnnnnnnnnnnnnnnnnnnnnnnnnnnnnnnnnnnnnnnnnnnnnnnnnnnnnnnnnnnnnnnnnnnnnnnnnnnnnnnnnnnnnnnnnnnnnnnnnnnnnnnnnnnnnnnnnnnnnnnnnnnnnnnnnnnnnnnnnnnnnnnnnnnnnnnnnnnnnnnnnnnnnnnnnnnnnnnnnnnnnnnnnnnnnnnnnnnnnnnnnnnnnnnnnnnnnnnnnnnnnnnnnnnnnnnnnnnnnnnnnnnnnnnnnnnnnnnnnnnnnnnnnnnnnnnnnnnnnnnnnnnnnnnnnnnnnnnnnnnnnnnnnnnnnnnnnnnnnnnnnnnnnnnnnnnnnnnnnnnnnnnnnnnnnnnnnnnnnnnnnnnnnnnnnnnnnnnnnnnnnnnnnnnnnnnnnnnnnnnnnnnnnnnnnnnnnnnnnnnnnnnnnnnnnnnnnnnnnnnnnnnnnnnnnnnnnnnnnnnnnnnnnnnnnnnnnnnnnnnnnnnnnnnnnnnnnnnnnnnnnnnnnnnnnnnnnnnnnnnnnnnnnnnnnnnnnnnnnnnnnnnnnnnnnnnnnnnnnnnnnnnnnnnnnnnnnnnnnnnnnnnnnnnnnnnnnnnnnnnnnnnnnnnnnnnnnnnnnnnnnnnnnnnnnnnnnnnnnnnnnnnnnnnnnnnnnnnnnnnnnnnnnnnnnnnnnnnnnnnnnnnnnnnnnnnnnnnnnnnnnnnnnnnnnnnnnnnnnnnnnnnnnnnnnnnnnnnnnnnnnnnnnnnnnnnnnnnnnnnnnnnnnnnnnnnnnnnnnnnnnnnnnnnnnnnnnnnnnnnnnnnnnnnnnnnnnnnnnnnnnnnnnnnnnnnnnnnnnnnnnnnnnnnnnnnnnnnnnnnnnnnnnnnnnnnnnnnnnnnnnnnnnnnnnnnnnnnnnnnnnnnnnnnnnnnnnnnnnnnnnnnnnnnnnnnnnnnnnnnnnnnnnnnnnnnnnnnnnnnnnnnnnnnnnnnnnnnnnnnnnnnnnnnnnnnnnnnnnnnnnnnnnnnnnnnnnnnnnnnnnnnnnnnnnnnnnnnnnnnnnnnnnnnnnnnnnnnnnnnnnnnnnnnnnnnnnnnnnnnnnnnnnnnnnnnnnnnnnnnnnnnnnnnnnnnnnnnnnnnnnnnnnnnnnnnnnnnnnnnnnnnnnnnnnnnnnnnnnnnnnnnnnnnnnnnnnnnnnnnnnnnnnnnnnnnnnnnnnnnnnnnnnnnnnnnnnnnnnnnnnnnnnnnnnnnnnnnnnnnnnnnnnnnnnnnnnnnnnnnnnnnnnnnnnnnnnnnnnnnnnnnnnnnnnnnnnnnnnnnnnnnnnnnnnnnnnnnnnnnnnnnnnnnnnnnnnnnnnnnnnnnnnnnnnnnnnnnnnnnnnnnnnnnnnnnnnnnnnnnnnnnnnnnnnnnnnnnnnnnnnnnnnnnnnnnnnnnnnnnnnnnnnnnnnnnnnnnnnnnnnnnnnnnnnnnnnnnnnnnnnnnnnnnnnnnnnnnnnnnnnnnnnnnnnnnnnnnnnnnnnnnnnnnnnnnnnnnnnnnnnnnnnnnnnnnnnnnnnnnnnnnnnnnnnnnnnnnnnnnnnnnnnnnnnnnnnnnnnnnnnnnnnnnnnnnnnnnnnnnnnnnnnnnnnnnnnnnnnnnnnnnnnnnnnnnnnnnnnnnnnnnnnnnnnnnnnnnnnnnnnnnnnnnnnnnnnnnnnnnnnnnnnnnnnnnnnnnnnnnnnnnnnnnnnnnnnnnnnnnnnnnnnnnnnnnnnnnnnnnnnnnnnnnnnnnnnnnnnnnnnnnnnnnnnnnnnnnnnnnnnnnnnnnnnnnnnnnnnnnnnnnnnnnnnnnnnnnnnnnnnnnnnnnnnnnnnnnnnnnnnnnnnnnnnnnnnnnnnnnnnnnnnnnnnnnnnnnnnnnnnnnnnnnnnnnnnnnnnnnnnnnnnnnnnnnnnnnnnnnnnnnnnnnnnnnnnnnnnnnnnnnnnnnnnnnnnnnnnnnnnnnnnnnnnnnnnnnnnnnnnnnnnnnnnnnnnnnnnnnnnnnnnnnnnnnnnnnnnnnnnnnnnnnnnnnnnnnnnnnnnnnnnnnnnnnnnnnnnnnnnnnnnnnnnnnnnnnnnnnnnnnnnnnnnnnnnnnnnnnnnnnnnnnnnnnnnnnnnnnnnnnnnnnnnnnnnnnnnnnnnnnnnnnnnnnnnnnnnnnnnnnnnnnnnnnnnnnnnnnnnnnnnnnnnnnnnnnnnnnnnnnnnnnnnnnnnnnnnnnnnnnnnnnnnnnnnnnnnnnnnnnnnnnnnnnnnnnnnnnnnnnnnnnnnnnnnnnnnnnnnnnnnnnnnnnnnnnnnnnnnnnnnnnnnnnnnnnnnnnnnnnnnnnnnnnnnnnnnnnnnnnnnnnnnnnnnnnnnnnnnnnnnnnnnnnnnnnnnnnnnnnnnnnnnnnnnnnnnnnnnnnnnnnnnnnnnnnnnnnnnnnnnnnnnnnnnnnnnnnnnnnnnnnnnnnnnnnnnnnnnnnnnnnnnnnnnnnnnnnnnnnnnnnnnnnnnnnnnnnnnnnnnnnnnnnnnnnnnnnnnnnnnnnnnnnnnnnnnnnnnnnnnnnnnnnnnnnnnnnnnnnnnnnnnnnnnnnnnnnnnnnnnnnnnnnnnnnnnnnnnnnnnnnnnnnnnnnnnnnnnnnnnnnnnnnnnnnnnnnnnnnnnnnnnnnnnnnnnnnnnnnnnnnnnnnnnnnnnnnnnnnnnnnnnnnnnnnnnnnnnnnnnnnnnnnnnnnnnnnnnnnnnnnnnnnnnnnnnnnnnnnnnnnnnnnnnnnnnnnnnnnnnnnnnnnnnnnnnnnnnnnnnnnnnnnnnnnnnnnnnnnnnnnnnnnnnnnnnnnnnnnnnnnnnnnnnnnnnnnnnnnnnnnnnnnnnnnnnnnnnnnnnnnnnnnnnnnnnnnnnnnnnnnnnnnnnnnnnnnnnnnnnnnnnnnnnnnnnnnnnnnnnnnnnnnnnnnnnnnnnnnnnnnnnnnnnnnnnnnnnnnnnnnnnnnnnnnnnnnnnnnnnnnnnnnnnnnnnnnnnnnnnnnnnnnnnnnnnnnnnnnnnnnnnnnnnnnnnnnnnnnnnnnnnnnnnnnnnnnnnnnnnnnnnnnnnnnnnnnnnnnnnnnnnnnnnnnnnnnnnnnnnnnnnnnnnnnnnnnnnnnnnnnnnnnnnnnnnnnnnnnnnnnnnnnnnnnnnnnnnnnnnnnnnnnnnnnnnnnnnnnnnnnnnnnnnnnnnnnnnnnnnnnnnnnnnnnnnnnnnnnnnnnnnnnnnnnnnnnnnnnnnnnnnnnnnnnnnnnnnnnnnnnnnnnnnnnnnnnnnnnnnnnnnnnnnnnnnnnnnnnnnnnnnnnnnnnnnnnnnnnnnnnnnnnnnnnnnnnnnnnnnnnnnnnnnnnnnnnnnnnnnnnnnnnnnnnnnnnnnnnnnnnnnnnnnnnnnnnnnnnnnnnnnnnnnnnnnnnnnnnnnnnnnnnnnnnnnnnnnnnnnnnnnnnnnnnnnnnnnnnnnnnnnnnnnnnnnnnnnnnnnnnnnnnnnnnnnnnnnnnnnnnnnnnnnnnnnnnnnnnnnnnnnnnnnnnnnnnnnnnnnnnnnnnnnnnnnnnnnnnnnnnnnnnnnnnnnnnnnnnnnnnnnnnnnnnnnnnnnnnnnnnnnnnnnnnnnnnnnnnnnnnnnnnnnnnnnnnnnnnnnnnnnnnnnnnnnnnnnnnnnnnnnnnnnnnnnnnnnnnnnnnnnnnnnnnnnnnnnnnnnnnnnnnnnnnnnnnnnnnnnnnnnnnnnnnnnnnnnnnnnnnnnnnnnnnnnnnnnnnnnnnnnnnnnnnnnnnnnnnnnnnnnnnnnnnnnnnnnnnnnnnnnnnnnnnnnnnnnnnnnnnnnnnnnnnnnnnnnnnnnnnnnnnnnnnnnnnnnnnnnnnnnnnnnnnnnnnnnnnnnnnnnnnnnnnnnnnnnnnnnnnnnnnnnnnnnnnnnnnnnnnnnnnnnnnnnnnnnnnnnnnnnnnnnnnnnnnnnnnnnnnnnnnnnnnnnnnnnnnnnnnnnnnnnnnnnnnnnnnnnnnnnnnnnnnnnnnnnnnnnnnnnnnnnnnnnnnnnnnnnnnnnnnnnnnnnnnnnnnnnnnnnnnnnnnnnnnnnnnnnnnnnnnnnnnnnnnnnnnnnnnnnnnnnnnnnnnnnnnnnnnnnnnnnnnnnnnnnnnnnnnnnnnnnnnnnnnnnnnnnnnnnnnnnnnnnnnnnnnnnnnnnnnnnnnnnnnnnnnnnnnnnnnnnnnnnnnnnnnnnnnnnnnnnnnnnnnnnnnnnnnnnnnnnnnnnnnnnnnnnnnnnnnnnnnnnnnnnnnnnnnnnnnnnnnnnnnnnnnnnnnnnnnnnnnnnnnnnnnnnnnnnnnnnnnnnnnnnnnnnnnnnnnnnnnnnnnnnnnnnnnnnnnnnnnnnnnnnnnnnnnnnnnnnnnnnnnnnnnnnnnnnnnnnnnnnnnnnnnnnnnnnnnnnnnnnnnnnnnnnnnnnnnnnnnnnnnnnnnnnnnnnnnnnnnnnnnnnnnnnnnnnnnnnnnnnnnnnnnnnnnnnnnnnnnnnnnnnnnnnnnnnnnnnnnnnnnnnnnnnnnnnnnnnnnnnnnnnnnnnnnnnnnnnnnnnnnnnnnnnnnnnnnnnnnnnnnnnnnnnnnnnnnnnnnnnnnnnnnnnnnnnnnnnnnnnnnnnnnnnnnnnnnnnnnnnnnnnnnnnnnnnnnnnnnnnnnnnnnnnnnnnnnnnnnnnnnnnnnnnnnnnnnnnnnnnnnnnnnnnnnnnnnnnnnnnnnnnnnnnnnnnnnnnnnnnnnnnnnnnnnnnnnnnnnnnnnnnnnnnnnnnnnnnnnnnnnnnnnnnnnnnnnnnnnnnnnnnnnnnnnnnnnnnnnnnnnnnnnnnnnnnnnnnnnnnnnnnnnnnnnnnnnnnnnnnnnnnnnnnnnnnnnnnnnnnnnnnnnnnnnnnnnnnnnnnnnnnnnnnnnnnnnnnnnnnnnnnnnnnnnnnnnnnnnnnnnnnnnnnnnnnnnnnnnnnnnnnnnnnnnnnnnnnnnnnnnnnnnnnnnnnnnnnnnnnnnnnnnnnnnnnnnnnnnnnnnnnnnnnnnnnnnnnnnnnnnnnnnnnnnnnnnnnnnnnnnnnnnnnnnnnnnnnnnnnnnnnnnnnnnnnnnnnnnnnnnnnnnnnnnnnnnnnnnnnnnnnnnnnnnnnnnnnnnnnnnnnnnnnnnnnnnnnnnnnnnnnnnnnnnnnnnnnnnnnnnnnnnnnnnnnnnnnnnnnnnnnnnnnnnnnnnnnnnnnnnnnnnnnnnnnnnnnnnnnnnnnnnnnnnnnnnnnnnnnnnnnnnnnnnnnnnnnnnnnnnnnnnnnnnnnnnnnnnnnnnnnnnnnnnnnnnnnnnnnnnnnnnnnnnnnnnnnnnnnnnnnnnnnnnnnnnnnnnnnnnnnnnnnnnnnnnnnnnnnnnnnnnnnnnnnnnnnnnnnnnnnnnnnnnnnnnnnnnnnnnnnnnnnnnnnnnnnnnnnnnnnnnnnnnnnnnnnnnnnnnnnnnnnnnnnnnnnnnnnnnnnnnnnnnnnnnnnnnnnnnnnnnnnnnnnnnnnnnnnnnnnnnnnnnnnnnnnnnnnnnnnnnnnnnnnnnnnnnnnnnnnnnnnnnnnnnnnnnnnnnnnnnnnnnnnnnnnnnnnnnnnnnnnnnnnnnnnnnnnnnnnnnnnnnnnnnnnnnnnnnnnnnnnnnnnnnnnnnnnnnnnnnnnnnnnnnnnnnnnnnnnnnnnnnnnnnnnnnnnnnnnnnnnnnnnnnnnnnnnnnnnnnnnnnnnnnnnnnnnnnnnnnnnnnnnnnnnnnnnnnnnnnnnnnnnnnnnnnnnnnnnnnnnnnnnnnnnnnnnnnnnnnnnnnnnnnnnnnnnnnnnnnnnnnnnnnnnnnnnnnnnnnnnnnnnnnnnnnnnnnnnnnnnnnnnnnnnnnnnnnnnnnnnnnnnnnnnnnnnnnnnnnnnnnnnnnnnnnnnnnnnnnnnnnnnnnnnnnnnnnnnnnnnnnnnnnnnnnnnnnnnnnnnnnnnnnnnnnnnnnnnnnnnnnnnnnnnnnnnnnnnnnnnnnnnnnnnnnnnnnnnnnnnnnnnnnnnnnnnnnnnnnnnnnnnnnnnnnnnnnnnnnnnnnnnnnnnnnnnnnnnnnnnnnnnnnnnnnnnnnnnnnnnnnnnnnnnnnnnnnnnnnnnnnnnnnnnnnnnnnnnnnnnnnnnnnnnnnnnnnnnnnnnnnnnnnnnnnnnnnnnnnnnnnnnnnnnnnnnnnnnnnnnnnnnnnnnnnnnnnnnnnnnnnnnnnnnnnnnnnnnnnnnnnnnnnnnnnnnnnnnnnnnnnnnnnnnnnnnnnnnnnnnnnnnnnnnnnnnnnnnnnnnnnnnnnnnnnnnnnnnnnnnnnnnnnnnnnnnnnnnnnnnnnnnnnnnnnnnnnnnnnnnnnnnnnnnnnnnnnnnnnnnnnnnnnnnnnnnnnnnnnnnnnnnnnnnnnnnnnnnnnnnnnnnnnnnnnnnnnnnnnnnnnnnnnnnnnnnnnnnnnnnnnnnnnnnnnnnnnnnnnnnnnnnnnnnnnnnnnnnnnnnnnnnnnnnnnnnnnnnnnnnnnnnnnnnnnnnnnnnnnnnnnnnnnnnnnnnnnnnnnnnnnnnnnnnnnnnnnnnnnnnnnnnnnnnnnnnnnnnnnnnnnnnnnnnnnnnnnnnnnnnnnnnnnnnnnnnnnnnnnnnnnnnnnnnnnnnnnnnnnnnnnnnnnnnnnnnnnnnnnnnnnnnnnnnnnnnnnnnnnnnnnnnnnnnnnnnnnnnnnnnnnnnnnnnnnnnnnnnnnnnnnnnnnnnnnnnnnnnnnnnnnnnnnnnnnnnnnnnnnnnnnnnnnnnnnnnnnnnnnnnnnnnnnnnnnnnnnnnnnnnnnnnnnnnnnnnnnnnnnnnnnnnnnnnnnnnnnnnnnnnnnnnnnnnnnnnnnnnnnnnnnnnnnnnnnnnnnnnnnnnnnnnnnnnnnnnnnnnnnnnnnnnnnnnnnnnnnnnnnnnnnnnnnnnnnnnnnnnnnnnnnnnnnnnnnnnnnnnnnnnnnnnnnnnnnnnnnnnnnnnnnnnnnnnnnnnnnnnnnnnnnnnnnnnnnnnnnnnnnnnnnnnnnnnnnnnnnnnnnnnnnnnnnnnnnnnnnnnnnnnnnnnnnnnnnnnnnnnnnnnnnnnnnnnnnnnnnnnnnnnnnnnnnnnnnnnnnnnnnnnnnnnnnnnnnnnnnnnnnnnnnnnnnnnnnnnnnnnnnnnnnnnnnnnnnnnnnnnnnnnnnnnnnnnnnnnnnnnnnnnnnnnnnnnnnnnnnnnnnnnnnnnnnnnnnnnnnnnnnnnnnnnnnnnnnnnnnnnnnnnnnnnnnnnnnnnnnnnnnnnnnnnnnnnnnnnnnnnnnnnnnnnnnnnnnnnnnnnnnnnnnnnnnnnnnnnnnnnnnnnnnnnnnnnnnnnnnnnnnnnnnnnnnnnnnnnnnnnnnnnnnnnnnnnnnnnnnnnnnnnnnnnnnnnnnnnnnnnnnnnnnnnnnnnnnnnnnnnnnnnnnnnnnnnnnnnnnnnnnnnnnnnnnnnnnnnnnnnnnnnnnnnnnnnnnnnnnnnnnnnnnnnnnnnnnnnnnnnnnnnnnnnnnnnnnnnnnnnnnnnnnnnnnnnnnnnnnnnnnnnnnnnnnnnnnnnnnnnnnnnnnnnnnnnnnnnnnnnnnnnnnnnnnnnnnnnnnnnnnnnnnnnnnnnnnnnnnnnnnnnnnnnnnnnnnnnnnnnnnnnnnnnnnnnnnnnnnnnnnnnnnnnnnnnnnnnnnnnnnnnnnnnnnnnnnnnnnnnnnnnnnnnnnnnnnnnnnnnnnnnnnnnnnnnnnnnnnnnnnnnnnnnnnnnnnnnnnnnnnnnnnnnnnnnnnnnnnnnnnnnnnnnnnnnnnnnnnnnnnnnnnnnnnnnnnnnnnnnnnnnnnnnnnnnnnnnnnnnnnnnnnnnnnnnnnnnnnnnnnnnnnnnnnnnnnnnnnnnnnnnnnnnnnnnnnnnnnnnnnnnnnnnnnnnnnnnnnnnnnnnnnnnnnnnnnnnnnnnnnnnnnnnnnnnnnnnnnnnnnnnnnnnnnnnnnnnnnnnnnnnnnnnnnnnnnnnnnnnnnnnnnnnnnnnnnnnnnnnnnnnnnnnnnnnnnnnnnnnnnnnnnnnnnnnnnnnnnnnnnnnnnnnnnnnnnnnnnnnnnnnnnnnnnnnnnnnnnnnnnnnnnnnnnnnnnnnnnnnnnnnnnnnnnnnnnnnnnnnnnnnnnnnnnnnnnnnnnnnnnnnnnnnnnnnnnnnnnnnnnnnnnnnnnnnnnnnnnnnnnnnnnnnnnnnnnnnnnnnnnnnnnnnnnnnnnnnnnnnnnnnnnnnnnnnnnnnnnnnnnnnnnnnnnnnnnnnnnnnnnnnnnnnnnnnnnnnnnnnnnnnnnnnnnnnnnnnnnnnnnnnnnnnnnnnnnnnnnnnnnnnnnnnnnnnnnnnnnnnnnnnnnnnnnnnnnnnnnnnnnnnnnnnnnnnnnnnnnnnnnnnnnnnnnnnnnnnnnnnnnnnnnnnnnnnnnnnnnnnnnnnnnnnnnnnnnnnnnnnnnnnnnnnnnnnnnnnnnnnnnnnnnnnnnnnnnnnnnnnnnnnnnnnnnnnnnnnnnnnnnnnnnnnnnnnnnnnnnnnnnnnnnnnnnnnnnnnnnnnnnnnnnnnnnnnnnnnnnnnnnnnnnnnnnnnnnnnnnnnnnnnnnnnnnnnnnnnnnnnnnnnnnnnnnnnnnnnnnnnnnnnnnnnnnnnnnnnnnnnnnnnnnnnnnnnnnnnnnnnnnnnnnnnnnnnnnnnnnnnnnnnnnnnnnnnnnnnnnnnnnnnnnnnnnnnnnnnnnnnnnnnnnnnnnnnnnnnnnnnnnnnnnnnnnnnnnnnnnnnnnnnnnnnnnnnnnnnnnnnnnnnnnnnnnnnnnnnnnnnnnnnnnnnnnnnnnnnnnnnnnnnnnnnnnnnnnnnnnnnnnnnnnnnnnnnnnnnnnnnnnnnnnnnnnnnnnnnnnnnnnnnnnnnnnnnnnnnnnnnnnnnnnnnnnnnnnnnnnnnnnnnnnnnnnnnnnnnnnnnnnnnnnnnnnnnnnnnnnnnnnnnnnnnnnnnnnnnnnnnnnnnnnnnnnnnnnnnnnnnnnnnnnnnnnnnnnnnnnnnnnnnnnnnnnnnnnnnnnnnnnnnnnnnnnnnnnnnnnnnnnnnnnnnnnnnnnnnnnnnnnnnnnnnnnnnnnnnnnnnnnnnnnnnnnnnnnnnnnnnnnnnnnnnnnnnnnnnnnnnnnnnnnnnnnnnnnnnnnnnnnnnnnnnnnnnnnnnnnnnnnnnnnnnnnnnnnnnnnnnnnnnnnnnnnnnnnnnnnnnnnnnnnnnnnnnnnnnnnnnnnnnnnnnnnnnnnnnnnnnnnnnnnnnnnnnnnnnnnnnnnnnnnnnnnnnnnnnnnnnnnnnnnnnnnnnnnnnnnnnnnnnnnnnnnnnnnnnnnnnnnnnnnnnnnnnnnnnnnnnnnnnnnnnnnnnnnnnnnnnnnnnnnnnnnnnnnnnnnnnnnnnnnnnnnnnnnnnnnnnnnnnnnnnnnnnnnnnnnnnnnnnnnnnnnnnnnnnnnnnnnnnnnnnnnnnnnnnnnnnnnnnnnnnnnnnnnnnnnnnnnnnnnnnnnnnnnnnnnnnnnnnnnnnnnnnnnnnnnnnnnnnnnnnnnnnnnnnnnnnnnnnnnnnnnnnnnnnnnnnnnnnnnnnnnnnnnnnnnnnnnnnnnnnnnnnnnnnnnnnnnnnnnnnnnnnnnnnnnnnnnnnnnnnnnnnnnnnnnnnnnnnnnnnnnnnnnnnnnnnnnnnnnnnnnnnnnnnnnnnnnnnnnnnnnnnnnnnnnnnnnnnnnnnnnnnnnnnnnnnnnnnnnnnnnnnnnnnnnnnnnnnnnnnnnnnnnnnnnnnnnnnnnnnnnnnnnnnnnnnnnnnnnnnnnnnnnnnnnnnnnnnnnnnnnnnnnnnnnnnnnnnnnnnnnnnnnnnnnnnnnnnnnnnnnnnnnnnnnnnnnnnnnnnnnnnnnnnnnnnnnnnnnnnnnnnnnnnnnnnnnnnnnnnnnnnnnnnnnnnnnnnnnnnnnnnnnnnnnnnnnnnnnnnnnnnnnnnnnnnnnnnnnnnnnnnnnnnnnnnnnnnnnnnnnnnnnnnnnnnnnnnnnnnnnnnnnnnnnnnnnnnnnnnnnnnnnnnnnnnnnnnnnnnnnnnnnnnnnnnnnnnnnnnnnnnnnnnnnnnnnnnnnnnnnnnnnnnnnnnnnnnnnnnnnnnnnnnnnnnnnnnnnnnnnnnnnnnnnnnnnnnnnnnnnnnnnnnnnnnnnnnnnnnnnnnnnnnnnnnnnnnnnnnnnnnnnnnnnnnnnnnnnnnnnnnnnnnnnnnnnnnnnnnnnnnnnnnnnnnnnnnnnnnnnnnnnnnnnnnnnnnnnnnnnnnnnnnnnnnnnnnnnnnnnnnnnnnnnnnnnnnnnnnnnnnnnnnnnnnnnnnnnnnnnnnnnnnnnnnnnnnnnnnnnnnnnnnnnnnnnnnnnnnnnnnnnnnnnnnnnnnnnnnnnnnnnnnnnnnnnnnnnnnnnnnnnnnnnnnnnnnnnnnnnnnnnnnnnnnnnnnnnnnnnnnnnnnnnnnnnnnnnnnnnnnnnnnnnnnnnnnnnnnnnnnnnnnnnnnnnnnnnnnnnnnnnnnnnnnnnnnnnnnnnnnnnnnnnnnnnnnnnnnnnnnnnnnnnnnnnnnnnnnnnnnnnnnnnnnnnnnnnnnnnnnnnnnnnnnnnnnnnnnnnnnnnnnnnnnnnnnnnnnnnnnnnnnnnnnnnnnnnnnnnnnnnnnnnnnnnnnnnnnnnnnnnnnnnnnnnnnnnnnnnnnnnnnnnnnnnnnnnnnnnnnnnnnnnnnnnnnnnnnnnnnnnnnnnnnnnnnnnnnnnnnnnnnnnnnnnnnnnnnnnnnnnnnnnnnnnnnnnnnnnnnnnnnnnnnnnnnnnnnnnnnnnnnnnnnnnnnnnnnnnnnnnnnnnnnnnnnnnnnnnnnnnnnnnnnnnnnnnnnnnnnnnnnnnnnnnnnnnnnnnnnnnnnnnnnnnnnnnnnnnnnnnnnnnnnnnnnnnnnnnnnnnnnnnnnnnnnnnnnnnnnnnnnnnnnnnnnnnnnnnnnnnnnnnnnnnnnnnnnnnnnnnnnnnnnnnnnnnnnnnnnnnnnnnnnnnnnnnnnnnnnnnnnnnnnnnnnnnnnnnnnnnnnnnnnnnnnnnnnnnnnnnnnnnnnnnnnnnnnnnnnnnnnnnnnnnnnnnnnnnnnnnnnnnnnnnnnnnnnnnnnnnnnnnnnnnnnnnnnnnnnnnnnnnnnnnnnnnnnnnnnnnnnnnnnnnnnnnnnnnnnnnnnnnnnnnnnnnnnnnnnnnnnnnnnnnnnnnnnnnnnnnnnnnnnnnnnnnnnnnnnnnnnnnnnnnnnnnnnnnnnnnnnnnnnnnnnnnnnnnnnnnnnnnnnnnnnnnnnnnnnnnnnnnnnnnnnnnnnnnnnnnnnnnnnnnnnnnnnnnnnnnnnnnnnnnnnnnnnnnnnnnnnnnnnnnnnnnnnnnnnnnnnnnnnnnnnnnnnnnnnnnnnnnnnnnnnnnnnnnnnnnnnnnnnnnnnnnnnnnnnnnnnnnnnnnnnnnnnnnnnnnnnnnnnnnnnnnnnnnnnnnnnnnnnnnnnnnnnnnnnnnnnnnnnnnnnnnnnnnnnnnnnnnnnnnnnnnnnnnnnnnnnnnnnnnnnnnnnnnnnnnnnnnnnnnnnnnnnnnnnnnnnnnnnnnnnnnnnnnnnnnnnnnnnnnnnnnnnnnnnnnnnnnnnnnnnnnnnnnnnnnnnnnnnnnnnnnnnnnnnnnnnnnnnnnnnnnnnnnnnnnnnnnnnnnnnnnnnnnnnnnnnnnnnnnnnnnnnnnnnnnnnnnnnnnnnnnnnnnnnnnnnnnnnnnnnnnnnnnnnnnnnnnnnnnnnnnnnnnnnnnnnnnnnnnnnnnnnnnnnnnnnnnnnnnnnnnnnnnnnnnnnnnnnnnnnnnnnnnnnnnnnnnnnnnnnnnnnnnnnnnnnnnnnnnnnnnnnnnnnnnnnnnnnnnnnnnnnnnnnnnnnnnnnnnnnnnnnnnnnnnnnnnnnnnnnnnnnnnnnnnnnnnnnnnnnnnnnnnnnnnnnnnnnnnnnnnnnnnnnnnnnnnnnnnnnnnnnnnnnnnnnnnnnnnnnnnnnnnnnnnnnnnnnnnnnnnnnnnnnnnnnnnnnnnnnnnnnnnnnnnnnnnnnnnnnnnnnnnnnnnnnnnnnnnnnnnnnnnnnnnnnnnnnnnnnnnnnnnnnnnnnnnnnnnnnnnnnnnnnnnnnnnnnnnnnnnnnnnnnnnnnnnnnnnnnnnnnnnnnnnnnnnnnnnnnnnnnnnnnnnnnnnnnnnnnnnnnnnnnnnnnnnnnnnnnnnnnnnnnnnnnnnnnnnnnnnnnnnnnnnnnnnnnnnnnnnnnnnnnnnnnnnnnnnnnnnnnnnnnnnnnnnnnnnnnnnnnnnnnnnnnnnnnnnnnnnnnnnnnnnnnnnnnnnnnnnnnnnnnnnnnnnnnnnnnnnnnnnnnnnnnnnnnnnnnnnnnnnnnnnnnnnnnnnnnnnnnnnnnnnnnnnnnnnnnnnnnnnnnnnnnnnnnnnnnnnnnnnnnnnnnnnnnnnnnnnnnnnnnnnnnnnnnnnnnnnnnnnnnnnnnnnnnnnnnnnnnnnnnnnnnnnnnnnnnnnnnnnnnnnnnnnnnnnnnnnnnnnnnnnnnnnnnnnnnnnnnnnnnnnnnnnnnnnnnnnnnnnnnnnnnnnnnnnnnnnnnnnnnnnnnnnnnnnnnnnnnnnnnnnnnnnnnnnnnnnnnnnnnnnnnnnnnnnnnnnnnnnnnnnnnnnnnnnnnnnnnnnnnnnnnnnnnnnnnnnnnnnnnnnnnnnnnnnnnnnnnnnnnnnnnnnnnnnnnnnnnnnnnnnnnnnnnnnnnnnnnnnnnnnnnnnnnnnnnnnnnnnnnnnnnnnnnnnnnnnnnnnnnnnnnnnnnnnnnnnnnnnnnnnnnnnnnnnnnnnnnnnnnnnnnnnnnnnnnnnnnnnnnnnnnnnnnnnnnnnnnnnnnnnnnnnnnnnnnnnnnnnnnnnnnnnnnnnnnnnnnnnnnnnnnnnnnnnnnnnnnnnnnnnnnnnnnnnnnnnnnnnnnnnnnnnnnnnnnnnnnnnnnnnnnnnnnnnnnnnnnnnnnnnnnnnnnnnnnnnnnnnnnnnnnnnnnnnnnnnnnnnnnnnnnnnnnnnnnnnnnnnnnnnnnnnnnnnnnnnnnnnnnnnnnnnnnnnnnnnnnnnnnnnnnnnnnnnnnnnnnnnnnnnnnnnnnnnnnnnnnnnnnnnnnnnnnnnnnnnnnnnnnnnnnnnnnnnnnnnnnnnnnnnnnnnnnnnnnnnnnnnnnnnnnnnnnnnnnnnnnnnnnnnnnnnnnnnnnnnnnnnnnnnnnnnnnnnnnnnnnnnnnnnnnnnnnnnnnnnnnnnnnnnnnnnnnnnnnnnnnnnnnnnnnnnnnnnnnnnnnnnnnnnnnnnnnnnnnnnnnnnnnnnnnnnnnnnnnnnnnnnnnnnnnnnnnnnnnnnnnnnnnnnnnnnnnnnnnnnnnnnnnnnnnnnnnnnnnnnnnnnnnnnnnnnnnnnnnnnnnnnnnnnnnnnnnnnnnnnnnnnnnnnnnnnnnnnnnnnnnnnnnnnnnnnnnnnnnnnnnnnnnnnnnnnnnnnnnnnnnnnnnnnnnnnnnnnnnnnnnnnnnnnnnnnnnnnnnnnnnnnnnnnnnnnnnnnnnnnnnnnnnnnnnnnnnnnnnnnnnnnnnnnnnnnnnnnnnnnnnnnnnnnnnnnnnnnnnnnnnnnnnnnnnnnnnnnnnnnnnnnnnnnnnnnnnnnnnnnnnnnnnnnnnnnnnnnnnnnnnnnnnnnnnnnnnnnnnnnnnnnnnnnnnnnnnnnnnnnnnnnnnnnnnnnnnnnnnnnnnnnnnnnnnnnnnnnnnnnnnnnnnnnnnnnnnnnnnnnnnnnnnnnnnnnnnnnnnnnnnnnnnnnnnnnnnnnnnnnnnnnnnnnnnnnnnnnnnnnnnnnnnnnnnnnnnnnnnnnnnnnnnnnnnnnnnnnnnnnnnnnnnnnnnnnnnnnnnnnnnnnnnnnnnnnnnnnnnnnnnnnnnnnnnnnnnnnnnnnnnnnnnnnnnnnnnnnnnnnnnnnnnnnnnnnnnnnnnnnnnnnnnnnnnnnnnnnnnnnnnnnnnnnnnnnnnnnnnnnnnnnnnnnnnnnnnnnnnnnnnnnnnnnnnnnnnnnnnnnnnnnnnnnnnnnnnnnnnnnnnnnnnnnnnnnnnnnnnnnnnnnnnnnnnnnnnnnnnnnnnnnnnnnnnnnnnnnnnnnnnnnnnnnnnnnnnnnnnnnnnnnnnnnnnnnnnnnnnnnnnnnnnnnnnnnnnnnnnnnnnnnnnnnnnnnnnnnnnnnnnnnnnnnnnnnnnnnnnnnnnnnnnnnnnnnnnnnnnnnnnnnnnnnnnnnnnnnnnnnnnnnnnnnnnnnnnnnnnnnnnnnnnnnnnnnnnnnnnnnnnnnnnnnnnnnnnnnnnnnnnnnnnnnnnnnnnnnnnnnnnnnnnnnnnnnnnnnnnnnnnnnnnnnnnnnnnnnnnnnnnnnnnnnnnnnnnnnnnnnnnnnnnnnnnnnnnnnnnnnnnnnnnnnnnnnnnnnnnnnnnnnnnnnnnnnnnnnnnnnnnnnnnnnnnnnnnnnnnnnnnnnnnnnnnnnnnnnnnnnnnnnnnnnnnnnnnnnnnnnnnnnnnnnnnnnnnnnnnnnnnnnnnnnnnnnnnnnnnnnnnnnnnnnnnnnnnnnnnnnnnnnnnnnnnnnnnnnnnnnnnnnnnnnnnnnnnnnnnnnnnnnnnnnnnnnnnnnnnnnnnnnnnnnnnnnnnnnnnnnnnnnnnnnnnnnnnnnnnnnnnnnnnnnnnnnnnnnnnnnnnnnnnnnnnnnnnnnnnnnnnnnnnnnnnnnnnnnnnnnnnnnnnnnnnnnnnnnnnnnnnnnnnnnnnnnnnnnnnnnnnnnnnnnnnnnnnnnnnnnnnnnnnnnnnnnnnnnnnnnnnnnnnnnnnnnnnnnnnnnnnnnnnnnnnnnnnnnnnnnnnnnnnnnnnnnnnnnnnnnnnnnnnnnnnnnnnnnnnnnnnnnnnnnnnnnnnnnnnnnnnnnnnnnnnnnnnnnnnnnnnnnnnnnnnnnnnnnnnnnnnnnnnnnnnnnnnnnnnnnnnnnnnnnnnnnnnnnnnnnnnnnnnnnnnnnnnnnnnnnnnnnnnnnnnnnnnnnnnnnnnnnnnnnnnnnnnnnnnnnnnnnnnnnnnnnnnnnnnnnnnnnnnnnnnnnnnnnnnnnnnnnnnnnnnnnnnnnnnnnnnnnnnnnnnnnnnnnnnnnnnnnnnnnnnnnnnnnnnnnnnnnnnnnnnnnnnnnnnnnnnnnnnnnnnnnnnnnnnnnnnnnnnnnnnnnnnnnnnnnnnnnnnnnnnnnnnnnnnnnnnnnnnnnnnnnnnnnnnnnnnnnnnnnnnnnnnnnnnnnnnnnnnnnnnnnnnnnnnnnnnnnnnnnnnnnnnnnnnnnnnnnnnnnnnnnnnnnnnnnnnnnnnnnnnnnnnnnnnnnnnnnnnnnnnnnnnnnnnnnnnnnnnnnnnnnnnnnnnnnnnnnnnnnnnnnnnnnnnnnnnnnnnnnnnnnnnnnnnnnnnnnnnnnnnnnnnnnnnnnnnnnnnnnnnnnnnnnnnnnnnnnnnnnnnnnnnnnnnnnnnnnnnnnnnnnnnnnnnnnnnnnnnnnnnnnnnnnnnnnnnnnnnnnnnnnnnnnnnnnnnnnnnnnnnnnnnnnnnnnnnnnnnnnnnnnnnnnnnnnnnnnnnnnnnnnnnnnnnnnnnnnnnnnnnnnnnnnnnnnnnnnnnnnnnnnnnnnnnnnnnnnnnnnnnnnnnnnnnnnnnnnnnnnnnnnnnnnnnnnnnnnnnnnnnnnnnnnnnnnnnnnnnnnnnnnnnnnnnnnnnnnnnnnnnnnnnnnnnnnnnnnnnnnnnnnnnnnnnnnnnnnnnnnnnnnnnnnnnnnnnnnnnnnnnnnnnnnnnnnnnnnnnnnnnnnnnnnnnnnnnnnnnnnnnnnnnnnnnnnnnnnnnnnnnnnnnnnnnnnnnnnnnnnnnnnnnnnnnnnnnnnnnnnnnnnnnnnnnnnnnnnnnnnnnnnnnnnnnnnnnnnnnnnnnnnnnnnnnnnnnnnnnnnnnnnnnnnnnnnnnnnnnnnnnnnnnnnnnnnnnnnnnnnnnnnnnnnnnnnnnnnnnnnnnnnnnnnnnnnnnnnnnnnnnnnnnnnnnnnnnnnnnnnnnnnnnnnnnnnnnnnnnnnnnnnnnnnnnnnnnnnnnnnnnnnnnnnnnnnnnnnnnnnnnnnnnnnnnnnnnnnnnnnnnnnnnnnnnnnnnnnnnnnnnnnnnnnnnnnnnnnnnnnnnnnnnnnnnnnnnnnnnnnnnnnnnnnnnnnnnnnnnnnnnnnnnnnnnnnnnnnnnnnnnnnnnnnnnnnnnnnnnnnnnnnnnnnnnnnnnnnnnnnnnnnnnnnnnnnnnnnnnnnnnnnnnnnnnnnnnnnnnnnnnnnnnnnnnnnnnnnnnnnnnnnnnnnnnnnnnnnnnnnnnnnnnnnnnnnnnnnnnnnnnnnnnnnnnnnnnnnnnnnnnnnnnnnnnnnnnnnnnnnnnnnnnnnnnnnnnnnnnnnnnnnnnnnnnnnnnnnnnnnnnnnnnnnnnnnnnnnnnnnnnnnnnnnnnnnnnnnnnnnnnnnnnnnnnnnnnnnnnnnnnnnnnnnnnnnnnnnnnnnnnnnnnnnnnnnnnnnnnnnnnnnnnnnnnnnnnnnnnnnnnnnnnnnnnnnnnnnnnnnnnnnnnnnnnnnnnnnnnnnnnnnnnnnnnnnnnnnnnnnnnnnnnnnnnnnnnnnnnnnnnnnnnnnnnnnnnnnnnnnnnnnnnnnnnnnnnnnnnnnnnnnnnnnnnnnnnnnnnnnnnnnnnnnnnnnnnnnnnnnnnnnnnnnnnnnnnnnnnnnnnnnnnnnnnnnnnnnnnnnnnnnnnnnnnnnnnnnnnnnnnnnnnnnnnnnnnnnnnnnnnnnnnnnnnnnnnnnnnnnnnnnnnnnnnnnnnnnnnnnnnnnnnnnnnnnnnnnnnnnnnnnnnnnnnnnnnnnnnnnnnnnnnnnnnnnnnnnnnnnnnnnnnnnnnnnnnnnnnnnnnnnnnnnnnnnnnnnnnnnnnnnnnnnnnnnnnnnnnnnnnnnnnnnnnnnnnnnnnnnnnnnnnnnnnnnnnnnnnnnnnnnnnnnnnnnnnnnnnnnnnnnnnnnnnnnnnnnnnnnnnnnnnnnnnnnnnnnnnnnnnnnnnnnnnnnnnnnnnnnnnnnnnnnnnnnnnnnnnnnnnnnnnnnnnnnnnnnnnnnnnnnnnnnnnnnnnnnnnnnnnnnnnnnnnnnnnnnnnnnnnnnnnnnnnnnnnnnnnnnnnnnnnnnnnnnnnnnnnnnnnnnnnnnnnnnnnnnnnnnnnnnnnnnnnnnnnnnnnnnnnnnnnnnnnnnnnnnnnnnnnnnnnnnnnnnnnnnnnnnnnnnnnnnnnnnnnnnnnnnnnnnnnnnnnnnnnnnnnnnnnnnnnnnnnnnnnnnnnnnnnnnnnnnnnnnnnnnnnnnnnnnnnnnnnnnnnnnnnnnnnnnnnnnnnnnnnnnnnnnnnnnnnnnnnnnnnnnnnnnnnnnnnnnnnnnnnnnnnnnnnnnnnnnnnnnnnnnnnnnnnnnnnnnnnnnnnnnnnnnnnnnnnnnnnnnnnnnnnnnnnnnnnnnnnnnnnnnnnnnnnnnnnnnnnnnnnnnnnnnnnnnnnnnnnnnnnnnnnnnnnnnnnnnnnnnnnnnnnnnnnnnnnnnnnnnnnnnnnnnnnnnnnnnnnnnnnnnnnnnnnnnnnnnnnnnnnnnnnnnnnnnnnnnnnnnnnnnnnnnnnnnnnnnnnnnnnnnnnnnnnnnnnnnnnnnnnnnnnnnnnnnnnnnnnnnnnnnnnnnnnnnnnnnnnnnnnnnnnnnnnnnnnnnnnnnnnnnnnnnnnnnnnnnnnnnnnnnnnnnnnnnnnnnnnnnnnnnnnnnnnnnnnnnnnnnnnnnnnnnnnnnnnnnnnnnnnnnnnnnnnnnnnnnnnnnnnnnnnnnnnnnnnnnnnnnnnnnnnnnnnnnnnnnnnnnnnnnnnnnnnnnnnnnnnnnnnnnnnnnnnnnnnnnnnnnnnnnnnnnnnnnnnnnnnnnnnnnnnnnnnnnnnnnnnnnnnnnnnnnnnnnnnnnnnnnnnnnnnnnnnnnnnnnnnnnnnnnnnnnnnnnnnnnnnnnnnnnnnnnnnnnnnnnnnnnnnnnnnnnnnnnnnnnnnnnnnnnnnnnnnnnnnnnnnnnnnnnnnnnnnnnnnnnnnnnnnnnnnnnnnnnnnnnnnnnnnnnnnnnnnnnnnnnnnnnnnnnnnnnnnnnnnnnnnnnnnnnnnnnnnnnnnnnnnnnnnnnnnnnnnnnnnnnnnnnnnnnnnnnnnnnnnnnnnnnnnnnnnnnnnnnnnnnnnnnnnnnnnnnnnnnnnnnnnnnnnnnnnnnnnnnnnnnnnnnnnnnnnnnnnnnnnnnnnnnnnnnnnnnnnnnnnnnnnnnnnnnnnnnnnnnnnnnnnnnnnnnnnnnnnnnnnnnnnnnnnnnnnnnnnnnnnnnnnnnnnnnnnnnnnnnnnnnnnnnnnnnnnnnnnnnnnnnnnnnnnnnnnnnnnnnnnnnnnnnnnnnnnnnnnnnnnnnnnnnnnnnnnnnnnnnnnnnnnnnnnnnnnnnnnnnnnnnnnnnnnnnnnnnnnnnnnnnnnnnnnnnnnnnnnnnnnnnnnnnnnnnnnnnnnnnnnnnnnnnnnnnnnnnnnnnnnnnnnnnnnnnnnnnnnnnnnnnnnnnnnnnnnnnnnnnnnnnnnnnnnnnnnnnnnnnnnnnnnnnnnnnnnnnnnnnnnnnnnnnnnnnnnnnnnnnnnnnnnnnnnnnnnnnnnnnnnnnnnnnnnnnnnnnnnnnnnnnnnnnnnnnnnnnnnnnnnnnnnnnnnnnnnnnnnnnnnnnnnnnnnnnnnnnnnnnnnnnnnnnnnnnnnnnnnnnnnnnnnnnnnnnnnnnnnnnnnnnnnnnnnnnnnnnnnnnnnnnnnnnnnnnnnnnnnnnnnnnnnnnnnnnnnnnnnnnnnnnnnnnnnnnnnnnnnnnnnnnnnnnnnnnnnnnnnnnnnnnnnnnnnnnnnnnnnnnnnnnnnnnnnnnnnnnnnnnnnnnnnnnnnnnnnnnnnnnnnnnnnnnnnnnnnnnnnnnnnnnnnnnnnnnnnnnnnnnnnnnnnnnnnnnnnnnnnnnnnnnnnnnnnnnnnnnnnnnnnnnnnnnnnnnnnnnnnnnnnnnnnnnnnnnnnnnnnnnnnnnnnnnnnnnnnnnnnnnnnnnnnnnnnnnnnnnnnnnnnnnnnnnnnnnnnnnnnnnnnnnnnnnnnnnnnnnnnnnnnnnnnnnnnnnnnnnnnnnnnnnnnnnnnnnnnnnnnnnnnnnnnnnnnnnnnnnnnnnnnnnnnnnnnnnnnnnnnnnnnnnnnnnnnnnnnnnnnnnnnnnnnnnnnnnnnnnnnnnnnnnnnnnnnnnnnnnnnnnnnnnnnnnnnnnnnnnnnnnnnnnnnnnnnnnnnnnnnnnnnnnnnnnnnnnnnnnnnnnnnnnnnnnnnnnnnnnnnnnnnnnnnnnnnnnnnnnnnnnnnnnnnnnnnnnnnnnnnnnnnnnnnnnnnnnnnnnnnnnnnnnnnnnnnnnnnnnnnnnnnnnnnnnnnnnnnnnnnnnnnnnnnnnnnnnnnnnnnnnnnnnnnnnnnnnnnnnnnnnnnnnnnnnnnnnnnnnnnnnnnnnnnnnnnnnnnnnnnnnnnnnnnnnnnnnnnnnnnnnnnnnnnnnnnnnnnnnnnnnnnnnnnnnnnnnnnnnnnnnnnnnnnnnnnnnnnnnnnnnnnnnnnnnnnnnnnnnnnnnnnnnnnnnnnnnnnnnnnnnnnnnnnnnnnnnnnnnnnnnnnnnnnnnnnnnnnnnnnnnnnnnnnnnnnnnnnnnnnnnnnnnnnnnnnnnnnnnnnnnnnnnnnnnnnnnnnnnnnnnnnnnnnnnnnnnnnnnnnnnnnnnnnnnnnnnnnnnnnnnnnnnnnnnnnnnnnnnnnnnnnnnnnnnnnnnnnnnnnnnnnnnnnnnnnnnnnnnnnnnnnnnnnnnnnnnnnnnnnnnnnnnnnnnnnnnnnnnnnnnnnnnnnnnnnnnnnnnnnnnnnnnnnnnnnnnnnnnnnnnnnnnnnnnnnnnnnnnnnnnnnnnnnnnnnnnnnnnnnnnnnnnnnnnnnnnnnnnnnnnnnnnnnnnnnnnnnnnnnnnnnnnnnnnnnnnnnnnnnnnnnnnnnnnnnnnnnnnnnnnnnnnnnnnnnnnnnnnnnnnnnnnnnnnnnnnnnnnnnnnnnnnnnnnnnnnnnnnnnnnnnnnnnnnnnnnnnnnnnnnnnnnnnnnnnnnnnnnnnnnnnnnnnnnnnnnnnnnnnnnnnnnnnnnnnnnnnnnnnnnnnnnnnnnnnnnnnnnnnnnnnnnnnnnnnnnnnnnnnnnnnnnnnnnnnnnnnnnnnnnnnnnnnnnnnnnnnnnnnnnnnnnnnnnnnnnnnnnnnnnnnnnnnnnnnnnnnnnnnnnnnnnnnnnnnnnnnnnnnnnnnnnnnnnnnnnnnnnnnnnnnnnnnnnnnnnnnnnnnnnnnnnnnnnnnnnnnnnnnnnnnnnnnnnnnnnnnnnnnnnnnnnnnnnnnnnnnnnnnnnnnnnnnnnnnnnnnnnnnnnnnnnnnnnnnnnnnnnnnnnnnnnnnnnnnnnnnnnnnnnnnnnnnnnnnnnnnnnnnnnnnnnnnnnnnnnnnnnnnnnnnnnnnnnnnnnnnnnnnnnnnnnnnnnnnnnnnnnnnnnnnnnnnnnnnnnnnnnnnnnnnnnnnnnnnnnnnnnnnnnnnnnnnnnnnnnnnnnnnnnnnnnnnnnnnnnnnnnnnnnnnnnnnnnnnnnnnnnnnnnnnnnnnnnnnnnnnnnnnnnnnnnnnnnnnnnnnnnnnnnnnnnnnnnnnnnnnnnnnnnnnnnnnnnnnnnnnnnnnnnnnnnnnnnnnnnnnnnnnnnnnnnnnnnnnnnnnnnnnnnnnnnnnnnnnnnnnnnnnnnnnnnnnnnnnnnnnnnnnnnnnnnnnnnnnnnnnnnnnnnnnnnnnnnnnnnnnnnnnnnnnnnnnnnnnnnnnnnnnnnnnnnnnnnnnnnnnnnnnnnnnnnnnnnnnnnnnnnnnnnnnnnnnnnnnnnnnnnnnnnnnnnnnnnnnnnnnnnnnnnnnnnnnnnnnnnnnnnnnnnnnnnnnnnnnnnnnnnnnnnnnnnnnnnnnnnnnnnnnnnnnnnnnnnnnnnnnnnnnnnnnnnnnnnnnnnnnnnnnnnnnnnnnnnnnnnnnnnnnnnnnnnnnnnnnnnnnnnnnnnnnnnnnnnnnnnnnnnnnnnnnnnnnnnnnnnnnnnnnnnnnnnnnnnnnnnnnnnnnnnnnnnnnnnnnnnnnnnnnnnnnnnnnnnnnnnnnnnnnnnnnnnnnnnnnnnnnnnnnnnnnnnnnnnnnnnnnnnnnnnnnnnnnnnnnnnnnnnnnnnnnnnnnnnnnnnnnnnnnnnnnnnnnnnnnnnnnnnnnnnnnnnnnnnnnnnnnnnnnnnnnnnnnnnnnnnnnnnnnnnnnnnnnnnnnnnnnnnnnnnnnnnnnnnnnnnnnnnnnnnnnnnnnnnnnnnnnnnnnnnnnnnnnnnnnnnnnnnnnnnnnnnnnnnnnnnnnnnnnnnnnnnnnnnnnnnnnnnnnnnnnnnnnnnnnnnnnnnnnnnnnnnnnnnnnnnnnnnnnnnnnnnnnnnnnnnnnnnnnnnnnnnnnnnnnnnnnnnnnnnnnnnnnnnnnnnnnnnnnnnnnnnnnnnnnnnnnnnnnnnnnnnnnnnnnnnnnnnnnnnnnnnnnnnnnnnnnnnnnnnnnnnnnnnnnnnnnnnnnnnnnnnnnnnnnnnnnnnnnnnnnnnnnnnnnnnnnnnnnnnnnnnnnnnnnnnnnnnnnnnnnnnnnnnnnnnnnnnnnnnnnnnnnnnnnnnnnnnnnnnnnnnnnnnnnnnnnnnnnnnnnnnnnnnnnnnnnnnnnnnnnnnnnnnnnnnnnnnnnnnnnnnnnnnnnnnnnnnnnnnnnnnnnnnnnnnnnnnnnnnnnnnnnnnnnnnnnnnnnnnnnnnnnnnnnnnnnnnnnnnnnnnnnnnnnnnnnnnnnnnnnnnnnnnnnnnnnnnnnnnnnnnnnnnnnnnnnnnnnnnnnnnnnnnnnnnnnnnnnnnnnnnnnnnnnnnnnnnnnnnnnnnnnnnnnnnnnnnnnnnnnnnnnnnnnnnnnnnnnnnnnnnnnnnnnnnnnnnnnnnnnnnnnnnnnnnnnnnnnnnnnnnnnnnnnnnnnnnnnnnnnnnnnnnnnnnnnnnnnnnnnnnnnnnnnnnnnnnnnnnnnnnnnnnnnnnnnnnnnnnnnnnnnnnnnnnnnnnnnnnnnnnnnnnnnnnnnnnnnnnnnnnnnnnnnnnnnnnnnnnnnnnnnnnnnnnnnnnnnnnnnnnnnnnnnnnnnnnnnnnnnnnnnnnnnnnnnnnnnnnnnnnnnnnnnnnnnnnnnnnnnnnnnnnnnnnnnnnnnnnnnnnnnnnnnnnnnnnnnnnnnnnnnnnnnnnnnnnnnnnnnnnnnnnnnnnnnnnnnnnnnnnnnnnnnnnnnnnnnnnnnnnnnnnnnnnnnnnnnnnnnnnnnnnnnnnnnnnnnnnnnnnnnnnnnnnnnnnnnnnnnnnnnnnnnnnnnnnnnnnnnnnnnnnnnnnnnnnnnnnnnnnnnnnnnnnnnnnnnnnnnnnnnnnnnnnnnnnnnnnnnnnnnnnnnnnnnnnnnnnnnnnnnnnnnnnnnnnnnnnnnnnnnnnnnnnnnnnnnnnnnnnnnnnnnnnnnnnnnnnnnnnnnnnnnnnnnnnnnnnnnnnnnnnnnnnnnnnnnnnnnnnnnnnnnnnnnnnnnnnnnnnnnnnnnnnnnnnnnnnnnnnnnnnnnnnnnnnnnnnnnnnnnnnnnnnnnnnnnnnnnnnnnnnnnnnnnnnnnnnnnnnnnnnnnnnnnnnnnnnnnnnnnnnnnnnnnnnnnnnnnnnnnnnnnnnnnnnnnnnnnnnnnnnnnnnnnnnnnnnnnnnnnnnnnnnnnnnnnnnnnnnnnnnnnnnnnnnnnnnnnnnnnnnnnnnnnnnnnnnnnnnnnnnnnnnnnnnnnnnnnnnnnnnnnnnnnnnnnnnnnnnnnnnnnnnnnnnnnnnnnnnnnnnnnnnnnnnnnnnnnnnnnnnnnnnnnnnnnnnnnnnnnnnnnnnnnnnnnnnnnnnnnnnnnnnnnnnnnnnnnnnnnnnnnnnnnnnnnnnnnnnnnnnnnnnnnnnnnnnnnnnnnnnnnnnnnnnnnnnnnnnnnnnnnnnnnnnnnnnnnnnnnnnnnnnnnnnnnnnnnnnnnnnnnnnnnnnnnnnnnnnnnnnnnnnnnnnnnnnnnnnnnnnnnnnnnnnnnnnnnnnnnnnnnnnnnnnnnnnnnnnnnnnnnnnnnnnnnnnnnnnnnnnnnnnnnnnnnnnnnnnnnnnnnnnnnnnnnnnnnnnnnnnnnnnnnnnnnnnnnnnnnnnnnnnnnnnnnnnnnnnnnnnnnnnnnnnnnnnnnnnnnnnnnnnnnnnnnnnnnnnnnnnnnnnnnnnnnnnnnnnnnnnnnnnnnnnnnnnnnnnnnnnnnnnnnnnnnnnnnnnnnnnnnnnnnnnnnnnnnnnnnnnnnnnnnnnnnnnnnnnnnnnnnnnnnnnnnnnnnnnnnnnnnnnnnnnnnnnnnnnnnnnnnnnnnnnnnnnnnnnnnnnnnnnnnnnnnnnnnnnnnnnnnnnnnnnnnnnnnnnnnnnnnnnnnnnnnnnnnnnnnnnnnnnnnnnnnnnnnnnnnnnnnnnnnnnnnnnnnnnnnnnnnnnnnnnnnnnnnnnnnnnnnnnnnnnnnnnnnnnnnnnnnnnnnnnnnnnnnnnnnnnnnnnnnnnnnnnnnnnnnnnnnnnnnnnnnnnnnnnnnnnnnnnnnnnnnnnnnnnnnnnnnnnnnnnnnnnnnnnnnnnnnnnnnnnnnnnnnnnnnnnnnnnnnnnnnnnnnnnnnnnnnnnnnnnnnnnnnnnnnnnnnnnnnnnnnnnnnnnnnnnnnnnnnnnnnnnnnnnnnnnnnnnnnnnnnnnnnnnnnnnnnnnnnnnnnnnnnnnnnnnnnnnnnnnnnnnnnnnnnnnnnnnnnnnnnnnnnnnnnnnnnnnnnnnnnnnnnnnnnnnnnnnnnnnnnnnnnnnnnnnnnnnnnnnnnnnnnnnnnnnnnnnnnnnnnnnnnnnnnnnnnnnnnnnnnnnnnnnnnnnnnnnnnnnnnnnnnnnnnnnnnnnnnnnnnnnnnnnnnnnnnnnnnnnnnnnnnnnnnnnnnnnnnnnnnnnnnnnnnnnnnnnnnnnnnnnnnnnnnnnnnnnnnnnnnnnnnnnnnnnnnnnnnnnnnnnnnnnnnnnnnnnnnnnnnnnnnnnnnnnnnnnnnnnnnnnnnnnnnnnnnnnnnnnnnnnnnnnnnnnnnnnnnnnnnnnnnnnnnnnnnnnnnnnnnnnnnnnnnnnnnnnnnnnnnnnnnnnnnnnnnnnnnnnnnnnnnnnnnnnnnnnnnnnnnnnnnnnnnnnnnnnnnnnnnnnnnnnnnnnnnnnnnnnnnnnnnnnnnnnnnnnnnnnnnnnnnnnnnnnnnnnnnnnnnnnnnnnnnnnnnnnnnnnnnnnnnnnnnnnnnnnnnnnnnnnnnnnnnnnnnnnnnnnnnnnnnnnnnnnnnnnnnnnnnnnnnnnnnnnnnnnnnnnnnnnnnnnnnnnnnnnnnnnnnnnnnnnnnnnnnnnnnnnnnnnnnnnnnnnnnnnnnnnnnnnnnnnnnnnnnnnnnnnnnnnnnnnnnnnnnnnnnnnnnnnnnnnnnnnnnnnnnnnnnnnnnnnnnnnnnnnnnnnnnnnnnnnnnnnnnnnnnnnnnnnnnnnnnnnnnnnnnnnnnnnnnnnnnnnnnnnnnnnnnnnnnnnnnnnnnnnnnnnnnnnnnnnnnnnnnnnnnnnnnnnnnnnnnnnnnnnnnnnnnnnnnnnnnnnnnnnnnnnnnnnnnnnnnnnnnnnnnnnnnnnnnnnnnnnnnnnnnnnnnnnnnnnnnnnnnnnnnnnnnnnnnnnnnnnnnnnnnnnnnnnnnnnnnnnnnnnnnnnnnnnnnnnnnnnnnnnnnnnnnnnnnnnnnnnnnnnnnnnnnnnnnnnnnnnnnnnnnnnnnnnnnnnnnnnnnnnnnnnnnnnnnnnnnnnnnnnnnnnnnnnnnnnnnnnnnnnnnnnnnnnnnnnnnnnnnnnnnnnnnnnnnnnnnnnnnnnnnnnnnnnnnnnnnnnnnnnnnnnnnnnnnnnnnnnnnnnnnnnnnnnnnnnnnnnnnnnnnnnnnnnnnnnnnnnnnnnnnnnnnnnnnnnnnnnnnnnnnnnnnnnnnnnnnnnnnnnnnnnnnnnnnnnnnnnnnnnnnnnnnnnnnnnnnnnnnnnnnnnnnnnnnnnnnnnnnnnnnnnnnnnnnnnnnnnnnnnnnnnnnnnnnnnnnnnnnnnnnnnnnnnnnnnnnnnnnnnnnnnnnnnnnnnnnnnnnnnnnnnnnnnnnnnnnnnnnnnnnnnnnnnnnnnnnnnnnnnnnnnnnnnnnnnnnnnnnnnnnnnnnnnnnnnnnnnnnnnnnnnnnnnnnnnnnnnnnnnnnnnnnnnnnnnnnnnnnnnnnnnnnnnnnnnnnnnnnnnnnnnnnnnnnnnnnnnnnnnnnnnnnnnnnnnnnnnnnnnnnnnnnnnnnnnnnnnnnnnnnnnnnnnnnnnnnnnnnnnnnnnnnnnnnnnnnnnnnnnnnnnnnnnnnnnnnnnnnnnnnnnnnnnnnnnnnnnnnnnnnnnnnnnnnnnnnnnnnnnnnnnnnnnnnnnnnnnnnnnnnnnnnnnnnnnnnnnnnnnnnnnnnnnnnnnnnnnnnnnnnnnnnnnnnnnnnnnnnnnnnnnnnnnnnnnnnnnnnnnnnnnnnnnnnnnnnnnnnnnnnnnnnnnnnnnnnnnnnnnnnnnnnnnnnnnnnnnnnnnnnnnnnnnnnnnnnnnnnnnnnnnnnnnnnnnnnnnnnnnnnnnnnnnnnnnnnnnnnnnnnnnnnnnnnnnnnnnnnnnnnnnnnnnnnnnnnnnnnnnnnnnnnnnnnnnnnnnnnnnnnnnnnnnnnnnnnnnnnnnnnnnnnnnnnnnnnnnnnnnnnnnnnnnnnnnnnnnnnnnnnnnnnnnnnnnnnnnnnnnnnnnnnnnnnnnnnnnnnnnnnnnnnnnnnnnnnnnnnnnnnnnnnnnnnnnnnnnnnnnnnnnnnnnnnnnnnnnnnnnnnnnnnnnnnnnnnnnnnnnnnnnnnnnnnnnnnnnnnnnnnnnnnnnnnnnnnnnnnnnnnnnnnnnnnnnnnnnnnnnnnnnnnnnnnnnnnnnnnnnnnnnnnnnnnnnnnnnnnnnnnnnnnnnnnnnnnnnnnnnnnnnnnnnnnnnnnnnnnnnnnnnnnnnnnnnnnnnnnnnnnnnnnnnnnnnnnnnnnnnnnnnnnnnnnnnnnnnnnnnnnnnnnnnnnnnnnnnnnnnnnnnnnnnnnnnnnnnnnnnnnnnnnnnnnnnnnnnnnnnnnnnnnnnnnnnnnnnnnnnnnnnnnnnnnnnnnnnnnnnnnnnnnnnnnnnnnnnnnnnnnnnnnnnnnnnnnnnnnnnnnnnnnnnnnnnnnnnnnnnnnnnnnnnnnnnnnnnnnnnnnnnnnnnnnnnnnnnnnnnnnnnnnnnnnnnnnnnnnnnnnnnnnnnnnnnnnnnnnnnnnnnnnnnnnnnnnnnnnnnnnnnnnnnnnnnnnnnnnnnnnnnnnnnnnnnnnnnnnnnnnnnnnnnnnnnnnnnnnnnnnnnnnnnnnnnnnnnnnnnnnnnnnnnnnnnnnnnnnnnnnnnnnnnnnnnnnnnnnnnnnnnnnnnnnnnnnnnnnnnnnnnnnnnnnnnnnnnnnnnnnnnnnnnnnnnnnnnnnnnnnnnnnnnnnnnnnnnnnnnnnnnnnnnnnnnnnnnnnnnnnnnnnnnnnnnnnnnnnnnnnnnnnnnnnnnnnnnnnnnnnnnnnnnnnnnnnnnnnnnnnnnnnnnnnnnnnnnnnnnnnnnnnnnnnnnnnnnnnnnnnnnnnnnnnnnnnnnnnnnnnnnnnnnnnnnnnnnnnnnnnnnnnnnnnnnnnnnnnnnnnnnnnnnnnnnnnnnnnnnnnnnnnnnnnnnnnnnnnnnnnnnnnnnnnnnnnnnnnnnnnnnnnnnnnnnnnnnnnnnnnnnnnnnnnnnnnnnnnnnnnnnnnnnnnnnnnnnnnnnnnnnnnnnnnnnnnnnnnnnnnnnnnnnnnnnnnnnnnnnnnnnnnnnnnnnnnnnnnnnnnnnnnnnnnnnnnnnnnnnnnnnnnnnnnnnnnnnnnnnnnnnnnnnnnnnnnnnnnnnnnnnnnnnnnnnnnnnnnnnnnnnnnnnnnnnnnnnnnnnnnnnnnnnnnnnnnnnnnnnnnnnnnnnnnnnnnnnnnnnnnnnnnnnnnnnnnnnnnnnnnnnnnnnnnnnnnnnnnnnnnnnnnnnnnnnnnnnnnnnnnnnnnnnnnnnnnnnnnnnnnnnnnnnnnnnnnnnnnnnnnnnnnnnnnnnnnnnnnnnnnnnnnnnnnnnnnnnnnnnnnnnnnnnnnnnnnnnnnnnnnnnnnnnnnnnnnnnnnnnnnnnnnnnnnnnnnnnnnnnnnnnnnnnnnnnnnnnnnnnnnnnnnnnnnnnnnnnnnnnnnnnnnnnnnnnnnnnnnnnnnnnnnnnnnnnnnnnnnnnnnnnnnnnnnnnnnnnnnnnnnnnnnnnnnnnnnnnnnnnnnnnnnnnnnnnnnnnnnnnnnnnnnnnnnnnnnnnnnnnnnnnnnnnnnnnnnnnnnnnnnnnnnnnnnnnnnnnnnnnnnnnnnnnnnnnnnnnnnnnnnnnnnnnnnnnnnnnnnnnnnnnnnnnnnnnnnnnnnnnnnnnnnnnnnnnnnnnnnnnnnnnnnnnnnnnnnnnnnnnnnnnnnnnnnnnnnnnnnnnnnnnnnnnnnnnnnnnnnnnnnnnnnnnnnnnnnnnnnnnnnnnnnnnnnnnnnnnnnnnnnnnnnnnnnnnnnnnnnnnnnnnnnnnnnnnnnnnnnnnnnnnnnnnnnnnnnnnnnnnnnnnnnnnnnnnnnnnnnnnnnnnnnnnnnnnnnnnnnnnnnnnnnnnnnnnnnnnnnnnnnnnnnnnnnnnnnnnnnnnnnnnnnnnnnnnnnnnnnnnnnnnnnnnnnnnnnnnnnnnnnnnnnnnnnnnnnnnnnnnnnnnnnnnnnnnnnnnnnnnnnnnnnnnnnnnnnnnnnnnnnnnnnnnnnnnnnnnnnnnnnnnnnnnnnnnnnnnnnnnnnnnnnnnnnnnnnnnnnnnnnnnnnnnnnnnnnnnnnnnnnnnnnnnnnnnnnnnnnnnnnnnnnnnnnnnnnnnnnnnnnnnnnnnnnnnnnnnnnnnnnnnnnnnnnnnnnnnnnnnnnnnnnnnnnnnnnnnnnnnnnnnnnnnnnnnnnnnnnnnnnnnnnnnnnnnnnnnnnnnnnnnnnnnnnnnnnnnnnnnnnnnnnnnnnnnnnnnnnnnnnnnnnnnnnnnnnnnnnnnnnnnnnnnnnnnnnnnnnnnnnnnnnnnnnnnnnnnnnnnnnnnnnnnnnnnnnnnnnnnnnnnnnnnnnnnnnnnnnnnnnnnnnnnnnnnnnnnnnnnnnnnnnnnnnnnnnnnnnnnnnnnnnnnnnnnnnnnnnnnnnnnnnnnnnnnnnnnnnnnnnnnnnnnnnnnnnnnnnnnnnnnnnnnnnnnnnnnnnnnnnnnnnnnnnnnnnnnnnnnnnnnnnnnnnnnnnnnnnnnnnnnnnnnnnnnnnnnnnnnnnnnnnnnnnnnnnnnnnnnnnnnnnnnnnnnnnnnnnnnnnnnnnnnnnnnnnnnnnnnnnnnnnnnnnnnnnnnnnnnnnnnnnnnnnnnnnnnnnnnnnnnnnnnnnnnnnnnnnnnnnnnnnnnnnnnnnnnnnnnnnnnnnnnnnnnnnnnnnnnnnnnnnnnnnnnnnnnnnnnnnnnnnnnnnnnnnnnnnnnnnnnnnnnnnnnnnnnnnnnnnnnnnnnnnnnnnnnnnnnnnnnnnnnnnnnnnnnnnnnnnnnnnnnnnnnnnnnnnnnnnnnnnnnnnnnnnnnnnnnnnnnnnnnnnnnnnnnnnnnnnnnnnnnnnnnnnnnnnnnnnnnnnnnnnnnnnnnnnnnnnnnnnnnnnnnnnnnnnnnnnnnnnnnnnnnnnnnnnnnnnnnnnnnnnnnnnnnnnnnnnnnnnnnnnnnnnnnnnnnnnnnnnnnnnnnnnnnnnnnnnnnnnnnnnnnnnnnnnnnnnnnnnnnnnnnnnnnnnnnnnnnnnnnnnnnnnnnnnnnnnnnnnnnnnnnnnnnnnnnnnnnnnnnnnnnnnnnnnnnnnnnnnnnnnnnnnnnnnnnnnnnnnnnnnnnnnnnnnnnnnnnnnnnnnnnnnnnnnnnnnnnnnnnnnnnnnnnnnnnnnnnnnnnnnnnnnnnnnnnnnnnnnnnnnnnnnnnnnnnnnnnnnnnnnnnnnnnnnnnnnnnnnnnnnnnnnnnnnnnnnnnnnnnnnnnnnnnnnnnnnnnnnnnnnnnnnnnnnnnnnnnnnnnnnnnnnnnnnnnnnnnnnnnnnnnnnnnnnnnnnnnnnnnnnnnnnnnnnnnnnnnnnnnnnnnnnnnnnnnnnnnnnnnnnnnnnnnnnnnnnnnnnnnnnnnnnnnnnnnnnnnnnnnnnnnnnnnnnnnnnnnnnnnnnnnnnnnnnnnnnnnnnnnnnnnnnnnnnnnnnnnnnnnnnnnnnnnnnnnnnnnnnnnnnnnnnnnnnnnnnnnnnnnnnnnnnnnnnnnnnnnnnnnnnnnnnnnnnnnnnnnnnnnnnnnnnnnnnnnnnnnnnnnnnnnnnnnnnnnnnnnnnnnnnnnnnnnnnnnnnnnnnnnnnnnnnnnnnnnnnnnnnnnnnnnnnnnnnnnnnnnnnnnnnnnnnnnnnnnnnnnnnnnnnnnnnnnnnnnnnnnnnnnnnnnnnnnnnnnnnnnnnnnnnnnnnnnnnnnnnnnnnnnnnnnnnnnnnnnnnnnnnnnnnnnnnnnnnnnnnnnnnnnnnnnnnnnnnnnnnnnnnnnnnnnnnnnnnnnnnnnnnnnnnnnnnnnnnnnnnnnnnnnnnnnnnnnnnnnnnnnnnnnnnnnnnnnnnnnnnnnnnnnnnnnnnnnnnnnnnnnnnnnnnnnnnnnnnnnnnnnnnnnnnnnnnnnnnnnnnnnnnnnnnnnnnnnnnnnnnnnnnnnnnnnnnnnnnnnnnnnnnnnnnnnnnnnnnnnnnnnnnnnnnnnnnnnnnnnnnnnnnnnnnnnnnnnnnnnnnnnnnnnnnnnnnnnnnnnnnnnnnnnnnnnnnnnnnnnnnnnnnnnnnnnnnnnnnnnnnnnnnnnnnnnnnnnnnnnnnnnnnnnnnnnnnnnnnnnnnnnnnnnnnnnnnnnnnnnnnnnnnnnnnnnnnnnnnnnnnnnnnnnnnnnnnnnnnnnnnnnnnnnnnnnnnnnnnnnnnnnnnnnnnnnnnnnnnnnnnnnnnnnnnnnnnnnnnnnnnnnnnnnnnnnnnnnnnnnnnnnnnnnnnnnnnnnnnnnnnnnnnnnnnnnnnnnnnnnnnnnnnnnnnnnnnnnnnnnnnnnnnnnnnnnnnnnnnnnnnnnnnnnnnnnnnnnnnnnnnnnnnnnnnnnnnnnnnnnnnnnnnnnnnnnnnnnnnnnnnnnnnnnnnnnnnnnnnnnnnnnnnnnnnnnnnnnnnnnnnnnnnnnnnnnnnnnnnnnnnnnnnnnnnnnnnnnnnnnnnnnnnnnnnnnnnnnnnnnnnnnnnnnnnnnnnnnnnnnnnnnnnnnnnnnnnnnnnnnnnnnnnnnnnnnnnnnnnnnnnnnnnnnnnnnnnnnnnnnnnnnnnnnnnnnnnnnnnnnnnnnnnnnnnnnnnnnnnnnnnnnnnnnnnnnnnnnnnnnnnnnnnnnnnnnnnnnnnnnnnnnnnnnnnnnnnnnnnnnnnnnnnnnnnnnnnnnnnnnnnnnnnnnnnnnnnnnnnnnnnnnnnnnnnnnnnnnnnnnnnnnnnnnnnnnnnnnnnnnnnnnnnnnnnnnnnnnnnnnnnnnnnnnnnnnnnnnnnnnnnnnnnnnnnnnnnnnnnnnnnnnnnnnnnnnnnnnnnnnnnnnnnnnnnnnnnnnnnnnnnnnnnnnnnnnnnnnnnnnnnnnnnnnnnnnnnnnnnnnnnnnnnnnnnnnnnnnnnnnnnnnnnnnnnnnnnnnnnnnnnnnnnnnnnnnnnnnnnnnnnnnnnnnnnnnnnnnnnnnnnnnnnnnnnnnnnnnnnnnnnnnnnnnnnnnnnnnnnnnnnnnnnnnnnnnnnnnnnnnnnnnnnnnnnnnnnnnnnnnnnnnnnnnnnnnnnnnnnnnnnnnnnnnnnnnnnnnnnnnnnnnnnnnnnnnnnnnnnnnnnnnnnnnnnnnnnnnnnnnnnnnnnnnnnnnnnnnnnnnnnnnnnnnnnnnnnnnnnnnnnnnnnnnnnnnnnnnnnnnnnnnnnnnnnnnnnnnnnnnnnnnnnnnnnnnnnnnnnnnnnnnnnnnnnnnnnnnnnnnnnnnnnnnnnnnnnnnnnnnnnnnnnnnnnnnnnnnnnnnnnnnnnnnnnnnnnnnnnnnnnnnnnnnnnnnnnnnnnnnnnnnnnnnnnnnnnnnnnnnnnnnnnnnnnnnnnnnnnnnnnnnnnnnnnnnnnnnnnnnnnnnnnnnnnnnnnnnnnnnnnnnnnnnnnnnnnnnnnnnnnnnnnnnnnnnnnnnnnnnnnnnnnnnnnnnnnnnnnnnnnnnnnnnnnnnnnnnnnnnnnnnnnnnnnnnnnnnnnnnnnnnnnnnnnnnnnnnnnnnnnnnnnnnnnnnnnnnnnnnnnnnnnnnnnnnnnnnnnnnnnnnnnnnnnnnnnnnnnnnnnnnnnnnnnnnnnnnnnnnnnnnnnnnnnnnnnnnnnnnnnnnnnnnnnnnnnnnnnnnnnnnnnnnnnnnnnnnnnnnnnnnnnnnnnnnnnnnnnnnnnnnnnnnnnnnnnnnnnnnnnnnnnnnnnnnnnnnnnnnnnnnnnnnnnnnnnnnnnnnnnnnnnnnnnnnnnnnnnnnnnnnnnnnnnnnnnnnnnnnnnnnnnnnnnnnnnnnnnnnnnnnnnnnnnnnnnnnnnnnnnnnnnnnnnnnnnnnnnnnnnnnnnnnnnnnnnnnnnnnnnnnnnnnnnnnnnnnnnnnnnnnnnnnnnnnnnnnnnnnnnnnnnnnnnnnnnnnnnnnnnnnnnnnnnnnnnnnnnnnnnnnnnnnnnnnnnnnnnnnnnnnnnnnnnnnnnnnnnnnnnnnnnnnnnnnnnnnnnnnnnnnnnnnnnnnnnnnnnnnnnnnnnnnnnnnnnnnnnnnnnnnnnnnnnnnnnnnnnnnnnnnnnnnnnnnnnnnnnnnnnnnnnnnnnnnnnnnnnnnnnnnnnnnnnnnnnnnnnnnnnnnnnnnnnnnnnnnnnnnnnnnnnnnnnnnnnnnnnnnnnnnnnnnnnnnnnnnnnnnnnnnnnnnnnnnnnnnnnnnnnnnnnnnnnnnnnnnnnnnnnnnnnnnnnnnnnnnnnnnnnnnnnnnnnnnnnnnnnnnnnnnnnnnnnnnnnnnnnnnnnnnnnnnnnnnnnnnnnnnnnnnnnnnnnnnnnnnnnnnnnnnnnnnnnnnnnnnnnnnnnnnnnnnnnnnnnnnnnnnnnnnnnnnnnnnnnnnnnnnnnnnnnnnnnnnnnnnnnnnnnnnnnnnnnnnnnnnnnnnnnnnnnnnnnnnnnnnnnnnnnnnnnnnnnnnnnnnnnnnnnnnnnnnnnnnnnnnnnnnnnnnnnnnnnnnnnnnnnnnnnnnnnnnnnnnnnnnnnnnnnnnnnnnnnnnnnnnnnnnnnnnnnnnnnnnnnnnnnnnnnnnnnnnnnnnnnnnnnnnnnnnnnnnnnnnnnnnnnnnnnnnnnnnnnnnnnnnnnnnnnnnnnnnnnnnnnnnnnnnnnnnnnnnnnnnnnnnnnnnnnnnnnnnnnnnnnnnnnnnnnnnnnnnnnnnnnnnnnnnnnnnnnnnnnnnnnnnnnnnnnnnnnnnnnnnnnnnnnnnnnnnnnnnnnnnnnnnnnnnnnnnnnnnnnnnnnnnnnnnnnnnnnnnnnnnnnnnnnnnnnnnnnnnnnnnnnnnnnnnnnnnnnnnnnnnnnnnnnnnnnnnnnnnnnnnnnnnnnnnnnnnnnnnnnnnnnnnnnnnnnnnnnnnnnnnnnnnnnnnnnnnnnnnnnnnnnnnnnnnnnnnnnnnnnnnnnnnnnnnnnnnnnnnnnnnnnnnnnnnnnnnnnnnnnnnnnnnnnnnnnnnnnnnnnnnnnnnnnnnnnnnnnnnnnnnnnnnnnnnnnnnnnnnnnnnnnnnnnnnnnnnnnnnnnnnnnnnnnnnnnnnnnnnnnnnnnnnnnnnnnnnnnnnnnnnnnnnnnnnnnnnnnnnnnnnnnnnnnnnnnnnnnnnnnnnnnnnnnnnnnnnnnnnnnnnnnnnnnnnnnnnnnnnnnnnnnnnnnnnnnnnnnnnnnnnnnnnnnnnnnnnnnnnnnnnnnnnnnnnnnnnnnnnnnnnnnnnnnnnnnnnnnnnnnnnnnnnnnnnnnnnnnnnnnnnnnnnnnnnnnnnnnnnnnnnnnnnnnnnnnnnnnnnnnnnnnnnnnnnnnnnnnnnnnnnnnnnnnnnnnnnnnnnnnnnnnnnnnnnnnnnnnnnnnnnnnnnnnnnnnnnnnnnnnnnnnnnnnnnnnnnnnnnnnnnnnnnnnnnnnnnnnnnnnnnnnnnnnnnnnnnnnnnnnnnnnnnnnnnnnnnnnnnnnnnnnnnnnnnnnnnnnnnnnnnnnnnnnnnnnnnnnnnnnnnnnnnnnnnnnnnnnnnnnnnnnnnnnnnnnnnnnnnnnnnnnnnnnnnnnnnnnnnnnnnnnnnnnnnnnnnnnnnnnnnnnnnnnnnnnnnnnnnnnnnnnnnnnnnnnnnnnnnnnnnnnnnnnnnnnnnnnnnnnnnnnnnnnnnnnnnnnnnnnnnnnnnnnnnnnnnnnnnnnnnnnnnnnnnnnnnnnnnnnnnnnnnnnnnnnnnnnnnnnnnnnnnnnnnnnnnnnnnnnnnnnnnnnnnnnnnnnnnnnnnnnnnnnnnnnnnnnnnnnnnnnnnnnnnnnnnnnnnnnnnnnnnnnnnnnnnnnnnnnnnnnnnnnnnnnnnnnnnnnnnnnnnnnnnnnnnnnnnnnnnnnnnnnnnnnnnnnnnnnnnnnnnnnnnnnnnnnnnnnnnnnnnnnnnnnnnnnnnnnnnnnnnnnnnnnnnnnnnnnnnnnnnnnnnnnnnnnnnnnnnnnnnnnnnnnnnnnnnnnnnnnnnnnnnnnnnnnnnnnnnnnnnnnnnnnnnnnnnnnnnnnnnnnnnnnnnnnnnnnnnnnnnnnnnnnnnnnnnnnnnnnnnnnnnnnnnnnnnnnnnnnnnnnnnnnnnnnnnnnnnnnnnnnnnnnnnnnnnnnnnnnnnnnnnnnnnnnnnnnnnnnnnnnnnnnnnnnnnnnnnnnnnnnnnnnnnnnnnnnnnnnnnnnnnnnnnnnnnnnnnnnnnnnnnnnnnnnnnnnnnnnnnnnnnnnnnnnnnnnnnnnnnnnnnnnnnnnnnnnnnnnnnnnnnnnnnnnnnnnnnnnnnnnnnnnnnnnnnnnnnnnnnnnnnnnnnnnnnnnnnnnnnnnnnnnnnnnnnnnnnnnnnnnnnnnnnnnnnnnnnnnnnnnnnnnnnnnnnnnnnnnnnnnnnnnnnnnnnnnnnnnnnnnnnnnnnnnnnnnnnnnnnnnnnnnnnnnnnnnnnnnnnnnnnnnnnnnnnnnnnnnnnnnnnnnnnnnnnnnnnnnnnnnnnnnnnnnnnnnnnnnnnnnnnnnnnnnnnnnnnnnnnnnnnnnnnnnnnnnnnnnnnnnnnnnnnnnnnnnnnnnnnnnnnnnnnnnnnnnnnnnnnnnnnnnnnnnnnnnnnnnnnnnnnnnnnnnnnnnnnnnnnnnnnnnnnnnnnnnnnnnnnnnnnnnnnnnnnnnnnnnnnnnnnnnnnnnnnnnnnnnnnnnnnnnnnnnnnnnnnnnnnnnnnnnnnnnnnnnnnnnnnnnnnnnnnnnnnnnnnnnnnnnnnnnnnnnnnnnnnnnnnnnnnnnnnnnnnnnnnnnnnnnnnnnnnnnnnnnnnnnnnnnnnnnnnnnnnnnnnnnnnnnnnnnnnnnnnnnnnnnnnnnnnnnnnnnnnnnnnnnnnnnnnnnnnnnnnnnnnnnnnnnnnnnnnnnnnnnnnnnnnnnnnnnnnnnnnnnnnnnnnnnnnnnnnnnnnnnnnnnnnnnnnnnnnnnnnnnnnnnnnnnnnnnnnnnnnnnnnnnnnnnnnnnnnnnnnnnnnnnnnnnnnnnnnnnnnnnnnnnnnnnnnnnnnnnnnnnnnnnnnnnnnnnnnnnnnnnnnnnnnnnnnnnnnnnnnnnnnnnnnnnnnnnnnnnnnnnnnnnnnnnnnnnnnnnnnnnnnnnnnnnnnnnnnnnnnnnnnnnnnnnnnnnnnnnnnnnnnnnnnnnnnnnnnnnnnnnnnnnnnnnnnnnnnnnnnnnnnnnnnnnnnnnnnnnnnnnnnnnnnnnnnnnnnnnnnnnnnnnnnnnnnnnnnnnnnnnnnnnnnnnnnnnnnnnnnnnnnnnnnnnnnnnnnnnnnnnnnnnnnnnnnnnnnnnnnnnnnnnnnnnnnnnnnnnnnnnnnnnnnnnnnnnnnnnnnnnnnnnnnnnnnnnnnnnnnnnnnnnnnnnnnnnnnnnnnnnnnnnnnnnnnnnnnnnnnnnnnnnnnnnnnnnnnnnnnnnnnnnnnnnnnnnnnnnnnnnnnnnnnnnnnnnnnnnnnnnnnnnnnnnnnnnnnnnnnnnnnnnnnnnnnnnnnnnnnnnnnnnnnnnnnnnnnnnnnnnnnnnnnnnnnnnnnnnnnnnnnnnnnnnnnnnnnnnnnnnnnnnnnnnnnnnnnnnnnnnnnnnnnnnnnnnnnnnnnnnnnnnnnnnnnnnnnnnnnnnnnnnnnnnnnnnnnnnnnnnnnnnnnnnnnnnnnnnnnnnnnnnnnnnnnnnnnnnnnnnnnnnnnnnnnnnnnnnnnnnnnnnnnnnnnnnnnnnnnnnnnnnnnnnnnnnnnnnnnnnnnnnnnnnnnnnnnnnnnnnnnnnnnnnnnnnnnnnnnnnnnnnnnnnnnnnnnnnnnnnnnnnnnnnnnnnnnnnnnnnnnnnnnnnnnnnnnnnnnnnnnnnnnnnnnnnnnnnnnnnnnnnnnnnnnnnnnnnnnnnnnnnnnnnnnnnnnnnnnnnnnnnnnnnnnnnnnnnnnnnnnnnnnnnnnnnnnnnnnnnnnnnnnnnnnnnnnnnnnnnnnnnnnnnnnnnnnnnnnnnnnnnnnnnnnnnnnnnnnnnnnnnnnnnnnnnnnnnnnnnnnnnnnnnnnnnnnnnnnnnnnnnnnnnnnnnnnnnnnnnnnnnnnnnnnnnnnnnnnnnnnnnnnnnnnnnnnnnnnnnnnnnnnnnnnnnnnnnnnnnnnnnnnnnnnnnnnnnnnnnnnnnnnnnnnnnnnnnnnnnnnnnnnnnnnnnnnnnnnnnnnnnnnnnnnnnnnnnnnnnnnnnnnnnnnnnnnnnnnnnnnnnnnnnnnnnnnnnnnnnnnnnnnnnnnnnnnnnnnnnnnnnnnnnnnnnnnnnnnnnnnnnnnnnnnnnnnnnnnnnnnnnnnnnnnnnnnnnnnnnnnnnnnnnnnnnnnnnnnnnnnnnnnnnnnnnnnnnnnnnnnnnnnnnnnnnnnnnnnnnnnnnnnnnnnnnnnnnnnnnnnnnnnnnnnnnnnnnnnnnnnnnnnnnnnnnnnnnnnnnnnnnnnnnnnnnnnnnnnnnnnnnnnnnnnnnnnnnnnnnnnnnnnnnnnnnnnnnnnnnnnnnnnnnnnnnnnnnnnnnnnnnnnnnnnnnnnnnnnnnnnnnnnnnnnnnnnnnnnnnnnnnnnnnnnnnnnnnnnnnnnnnnnnnnnnnnnnnnnnnnnnnnnnnnnnnnnnnnnnnnnnnnnnnnnnnnnnnnnnnnnnnnnnnnnnnnnnnnnnnnnnnnnnnnnnnnnnnnnnnnnnnnnnnnnnnnnnnnnnnnnnnnnnnnnnnnnnnnnnnnnnnnnnnnnnnnnnnnnnnnnnnnnnnnnnnnnnnnnnnnnnnnnnnnnnnnnnnnnnnnnnnnnnnnnnnnnnnnnnnnnnnnnnnnnnnnnnnnnnnnnnnnnnnnnnnnnnnnnnnnnnnnnnnnnnnnnnnnnnnnnnnnnnnnnnnnnnnnnnnnnnnnnnnnnnnnnnnnnnnnnnnnnnnnnnnnnnnnnnnnnnnnnnnnnnnnnnnnnnnnnnnnnnnnnnnnnnnnnnnnnnnnnnnnnnnnnnnnnnnnnnnnnnnnnnnnnnnnnnnnnnnnnnnnnnnnnnnnnnnnnnnnnnnnnnnnnnnnnnnnnnnnnnnnnnnnnnnnnnnnnnnnnnnnnnnnnnnnnnnnnnnnnnnnnnnnnnnnnnnnnnnnnnnnnnnnnnnnnnnnnnnnnnnnnnnnnnnnnnnnnnnnnnnnnnnnnnnnnnnnnnnnnnnnnnnnnnnnnnnnnnnnnnnnnnnnnnnnnnnnnnnnnnnnnnnnnnnnnnnnnnnnnnnnnnnnnnnnnnnnnnnnnnnnnnnnnnnnnnnnnnnnnnnnnnnnnnnnnnnnnnnnnnnnnnnnnnnnnnnnnnnnnnnnnnnnnnnnnnnnnnnnnnnnnnnnnnnnnnnnnnnnnnnnnnnnnnnnnnnnnnnnnnnnnnnnnnnnnnnnnnnnnnnnnnnnnnnnnnnnnnnnnnnnnnnnnnnnnnnnnnnnnnnnnnnnnnnnnnnnnnnnnnnnnnnnnnnnnnnnnnnnnnnnnnnnnnnnnnnnnnnnnnnnnnnnnnnnnnnnnnnnnnnnnnnnnnnnnnnnnnnnnnnnnnnnnnnnnnnnnnnnnnnnnnnnnnnnnnnnnnnnnnnnnnnnnnnnnnnnnnnnnnnnnnnnnnnnnnnnnnnnnnnnnnnnnnnnnnnnnnnnnnnnnnnnnnnnnnnnnnnnnnnnnnnnnnnnnnnnnnnnnnnnnnnnnnnnnnnnnnnnnnnnnnnnnnnnnnnnnnnnnnnnnnnnnnnnnnnnnnnnnnnnnnnnnnnnnnnnnnnnnnnnnnnnnnnnnnnnnnnnnnnnnnnnnnnnnnnnnnnnnnnnnnnnnnnnnnnnnnnnnnnnnnnnnnnnnnnnnnnnnnnnnnnnnnnnnnnnnnnnnnnnnnnnnnnnnnnnnnnnnnnnnnnnnnnnnnnnnnnnnnnnnnnnnnnnnnnnnnnnnnnnnnnnnnnnnnnnnnnnnnnnnnnnnnnnnnnnnnnnnnnnnnnnnnnnnnnnnnnnnnnnnnnnnnnnnnnnnnnnnnnnnnnnnnnnnnnnnnnnnnnnnnnnnnnnnnnnnnnnnnnnnnnnnnnnnnnnnnnnnnnnnnnnnnnnnnnnnnnnnnnnnnnnnnnnnnnnnnnnnnnnnnnnnnnnnnnnnnnnnnnnnnnnnnnnnnnnnnnnnnnnnnnnnnnnnnnnnnnnnnnnnnnnnnnnnnnnnnnnnnnnnnnnnnnnnnnnnnnnnnnnnnnnnnnnnnnnnnnnnnnnnnnnnnnnnnnnnnnnnnnnnnnnnnnnnnnnnnnnnnnnnnnnnnnnnnnnnnnnnnnnnnnnnnnnnnnnnnnnnnnnnnnnnnnnnnnnnnnnnnnnnnnnnnnnnnnnnnnnnnnnnnnnnnnnnnnnnnnnnnnnnnnnnnnnnnnnnnnnnnnnnnnnnnnnnnnnnnnnnnnnnnnnnnnnnnnnnnnnnnnnnnnnnnnnnnnnnnnnnnnnnnnnnnnnnnnnnnnnnnnnnnnnnnnnnnnnnnnnnnnnnnnnnnnnnnnnnnnnnnnnnnnnnnnnnnnnnnnnnnnnnnnnnnnnnnnnnnnnnnnnnnnnnnnnnnnnnnnnnnnnnnnnnnnnnnnnnnnnnnnnnnnnnnnnnnnnnnnnnnnnnnnnnnnnnnnnnnnnnnnnnnnnnnnnnnnnnnnnnnnnnnnnnnnnnnnnnnnnnnnnnnnnnnnnnnnnnnnnnnnnnnnnnnnnnnnnnnnnnnnnnnnnnnnnnnnnnnnnnnnnnnnnnnnnnnnnnnnnnnnnnnnnnnnnnnnnnnnnnnnnnnnnnnnnnnnnnnnnnnnnnnnnnnnnnnnnnnnnnnnnnnnnnnnnnnnnnnnnnnnnnnnnnnnnnnnnnnnnnnnnnnnnnnnnnnnnnnnnnnnnnnnnnnnnnnnnnnnnnnnnnnnnnnnnnnnnnnnnnnnnnnnnnnnnnnnnnnnnnnnnnnnnnnnnnnnnnnnnnnnnnnnnnnnnnnnnnnnnnnnnnnnnnnnnnnnnnnnnnnnnnnnnnnnnnnnnnnnnnnnnnnnnnnnnnnnnnnnnnnnnnnnnnnnnnnnnnnnnnnnnnnnnnnnnnnnnnnnnnnnnnnnnnnnnnnnnnnnnnnnnnnnnnnnnnnnnnnnnnnnnnnnnnnnnnnnnnnnnnnnnnnnnnnnnnnnnnnnnnnnnnnnnnnnnnnnnnnnnnnnnnnnnnnnnnnnnnnnnnnnnnnnnnnnnnnnnnnnnnnnnnnnnnnnnnnnnnnnnnnnnnnnnnnnnnnnnnnnnnnnnnnnnnnnnnnnnnnnnnnnnnnnnnnnnnnnnnnnnnnnnnnnnnnnnnnnnnnnnnnnnnnnnnnnnnnnnnnnnnnnnnnnnnnnnnnnnnnnnnnnnnnnnnnnnnnnnnnnnnnnnnnnnnnnnnnnnnnnnnnnnnnnnnnnnnnnnnnnnnnnnnnnnnnnnnnnnnnnnnnnnnnnnnnnnnnnnnnnnnnnnnnnnnnnnnnnnnnnnnnnnnnnnnnnnnnnnnnnnnnnnnnnnnnnnnnnnnnnnnnnnnnnnnnnnnnnnnnnnnnnnnnnnnnnnnnnnnnnnnnnnnnnnnnnnnnnnnnnnnnnnnnnnnnnnnnnnnnnnnnnnnnnnnnnnnnnnnnnnnnnnnnnnnnnnnnnnnnnnnnnnnnnnnnnnnnnnnnnnnnnnnnnnnnnnnnnnnnnnnnnnnnnnnnnnnnnnnnnnnnnnnnnnnnnnnnnnnnnnnnnnnnnnnnnnnnnnnnnnnnnnnnnnnnnnnnnnnnnnnnnnnnnnnnnnnnnnnnnnnnnnnnnnnnnnnnnnnnnnnnnnnnnnnnnnnnnnnnnnnnnnnnnnnnnnnnnnnnnnnnnnnnnnnnnnnnnnnnnnnnnnnnnnnnnnnnnnnnnnnnnnnnnnnnnnnnnnnnnnnnnnnnnnnnnnnnnnnnnnnnnnnnnnnnnnnnnnnnnnnnnnnnnnnnnnnnnnnnnnnnnnnnnnnnnnnnnnnnnnnnnnnnnnnnnnnnnnnnnnnnnnnnnnnnnnnnnnnnnnnnnnnnnnnnnnnnnnnnnnnnnnnnnnnnnnnnnnnnnnnnnnnnnnnnnnnnnnnnnnnnnnnnnnnnnnnnnnnnnnnnnnnnnnnnnnnnnnnnnnnnnnnnnnnnnnnnnnnnnnnnnnnnnnnnnnnnnnnnnnnnnnnnnnnnnnnnnnnnnnnnnnnnnnnnnnnnnnnnnnnnnnnnnnnnnnnnnnnnnnnnnnnnnnnnnnnnnnnnnnnnnnnnnnnnnnnnnnnnnnnnnnnnnnnnnnnnnnnnnnnnnnnnnnnnnnnnnnnnnnnnnnnnnnnnnnnnnnnnnnnnnnnnnnnnnnnnnnnnnnnnnnnnnnnnnnnnnnnnnnnnnnnnnnnnnnnnnnnnnnnnnnnnnnnnnnnnnnnnnnnnnnnnnnnnnnnnnnnnnnnnnnnnnnnnnnnnnnnnnnnnnnnnnnnnnnnnnnnnnnnnnnnnnnnnnnnnnnnnnnnnnnnnnnnnnnnnnnnnnnnnnnnnnnnnnnnnnnnnnnnnnnnnnnnnnnnnnnnnnnnnnnnnnnnnnnnnnnnnnnnnnnnnnnnnnnnnnnnnnnnnnnnnnnnnnnnnnnnnnnnnnnnnnnnnnnnnnnnnnnnnnnnnnnnnnnnnnnnnnnnnnnnnnnnnnnnnnnnnnnnnnnnnnnnnnnnnnnnnnnnnnnnnnnnnnnnnnnnnnnnnnnnnnnnnnnnnnnnnnnnnnnnnnnnnnnnnnnnnnnnnnnnnnnnnnnnnnnnnnnnnnnnnnnnnnnnnnnnnnnnnnnnnnnnnnnnnnnnnnnnnnnnnnnnnnnnnnnnnnnnnnnnnnnnnnnnnnnnnnnnnnnnnnnnnnnnnnnnnnnnnnnnnnnnnnnnnnnnnnnnnnnnnnnnnnnnnnnnnnnnnnnnnnnnnnnnnnnnnnnnnnnnnnnnnnnnnnnnnnnnnnnnnnnnnnnnnnnnnnnnnnnnnnnnnnnnnnnnnnnnnnnnnnnnnnnnnnnnnnnnnnnnnnnnnnnnnnnnnnnnnnnnnnnnnnnnnnnnnnnnnnnnnnnnnnnnnnnnnnnnnnnnnnnnnnnnnnnnnnnnnnnnnnnnnnnnnnnnnnnnnnnnnnnnnnnnnnnnnnnnnnnnnnnnnnnnnnnnnnnnnnnnnnnnnnnnnnnnnnnnnnnnnnnnnnnnnnnnnnnnnnnnnnnnnnnnnnnnnnnnnnnnnnnnnnnnnnnnnnnnnnnnnnnnnnnnnnnnnnnnnnnnnnnnnnnnnnnnnnnnnnnnnnnnnnnnnnnnnnnnnnnnnnnnnnnnnnnnnnnnnnnnnnnnnnnnnnnnnnnnnnnnnnnnnnnnnnnnnnnnnnnnnnnnnnnnnnnnnnnnnnnnnnnnnnnnnnnnnnnnnnnnnnnnnnnnnnnnnnnnnnnnnnnnnnnnnnnnnnnnnnnnnnnnnnnnnnnnnnnnnnnnnnnnnnnnnnnnnnnnnnnnnnnnnnnnnnnnnnnnnnnnnnnnnnnnnnnnnnnnnnnnnnnnnnnnnnnnnnnnnnnnnnnnnnnnnnnnnnnnnnnnnnnnnnnnnnnnnnnnnnnnnnnnnnnnnnnnnnnnnnnnnnnnnnnnnnnnnnnnnnnnnnnnnnnnnnnnnnnnnnnnnnnnnnnnnnnnnnnnnnnnnnnnnnnnnnnnnnnnnnnnnnnnnnnnnnnnnnnnnnnnnnnnnnnnnnnnnnnnnnnnnnnnnnnnnnnnnnnnnnnnnnnnnnnnnnnnnnnnnnnnnnnnnnnnnnnnnnnnnnnnnnnnnnnnnnnnnnnnnnnnnnnnnnnnnnnnnnnnnnnnnnnnnnnnnnnnnnnnnnnnnnnnnnnnnnnnnnnnnnnnnnnnnnnnnnnnnnnnnnnnnnnnnnnnnnnnnnnnnnnnnnnnnnnnnnnnnnnnnnnnnnnnnnnnnnnnnnnnnnnnnnnnnnnnnnnnnnnnnnnnnnnnnnnnnnnnnnnnnnnnnnnnnnnnnnnnnnnnnnnnnnnnnnnnnnnnnnnnnnnnnnnnnnnnnnnnnnnnnnnnnnnnnnnnnnnnnnnnnnnnnnnnnnnnnnnnnnnnnnnnnnnnnnnnnnnnnnnnnnnnnnnnnnnnnnnnnnnnnnnnnnnnnnnnnnnnnnnnnnnnnnnnnnnnnnnnnnnnnnnnnnnnnnnnnnnnnnnnnnnnnnnnnnnnnnnnnnnnnnnnnnnnnnnnnnnnnnnnnnnnnnnnnnnnnnnnnnnnnnnnnnnnnnnnnnnnnnnnnnnnnnnnnnnnnnnnnnnnnnnnnnnnnnnnnnnnnnnnnnnnnnnnnnnnnnnnnnnnnnnnnnnnnnnnnnnnnnnnnnnnnnnnnnnnnnnnnnnnnnnnnnnnnnnnnnnnnnnnnnnnnnnnnnnnnnnnnnnnnnnnnnnnnnnnnnnnnnnnnnnnnnnnnnnnnnnnnnnnnnnnnnnnnnnnnnnnnnnnnnnnnnnnnnnnnnnnnnnnnnnnnnnnnnnnnnnnnnnnnnnnnnnnnnnnnnnnnnnnnnnnnnnnnnnnnnnnnnnnnnnnnnnnnnnnnnnnnnnnnnnnnnnnnnnnnnnnnnnnnnnnnnnnnnnnnnnnnnnnnnnnnnnnnnnnnnnnnnnnnnnnnnnnnnnnnnnnnnnnnnnnnnnnnnnnnnnnnnnnnnnnnnnnnnnnnnnnnnnnnnnnnnnnnnnnnnnnnnnnnnnnnnnnnnnnnnnnnnnnnnnnnnnnnnnnnnnnnnnnnnnnnnnnnnnnnnnnnnnnnnnnnnnnnnnnnnnnnnnnnnnnnnnnnnnnnnnnnnnnnnnnnnnnnnnnnnnnnnnnnnnnnnnnnnnnnnnnnnnnnnnnnnnnnnnnnnnnnnnnnnnnnnnnnnnnnnnnnnnnnnnnnnnnnnnnnnnnnnnnnnnnnnnnnnnnnnnnnnnnnnnnnnnnnnnnnnnnnnnnnnnnnnnnnnnnnnnnnnnnnnnnnnnnnnnnnnnnnnnnnnnnnnnnnnnnnnnnnnnnnnnnnnnnnnnnnnnnnnnnnnnnnnnnnnnnnnnnnnnnnnnnnnnnnnnnnnnnnnnnnnnnnnnnnnnnnnnnnnnnnnnnnnnnnnnnnnnnnnnnnnnnnnnnnnnnnnnnnnnnnnnnnnnnnnnnnnnnnnnnnnnnnnnnnnnnnnnnnnnnnnnnnnnnnnnnnnnnnnnnnnnnnnnnnnnnnnnnnnnnnnnnnnnnnnnnnnnnnnnnnnnnnnnnnnnnnnnnnnnnnnnnnnnnnnnnnnnnnnnnnnnnnnnnnnnnnnnnnnnnnnnnnnnnnnnnnnnnnnnnnnnnnnnnnnnnnnnnnnnnnnnnnnnnnnnnnnnnnnnnnnnnnnnnnnnnnnnnnnnnnnnnnnnnnnnnnnnnnnnnnnnnnnnnnnnnnnnnnnnnnnnnnnnnnnnnnnnnnnnnnnnnnnnnnnnnnnnnnnnnnnnnnnnnnnnnnnnnnnnnnnnnnnnnnnnnnnnnnnnnnnnnnnnnnnnnnnnnnnnnnnnnnnnnnnnnnnnnnnnnnnnnnnnnnnnnnnnnnnnnnnnnnnnnnnnnnnnnnnnnnnnnnnnnnnnnnnnnnnnnnnnnnnnnnnnnnnnnnnnnnnnnnnnnnnnnnnnnnnnnnnnnnnnnnnnnnnnnnnnnnnnnnnnnnnnnnnnnnnnnnnnnnnnnnnnnnnnnnnnnnnnnnnnnnnnnnnnnnnnnnnnnnnnnnnnnnnnnnnnnnnnnnnnnnnnnnnnnnnnnnnnnnnnnnnnnnnnnnnnnnnnnnnnnnnnnnnnnnnnnnnnnnnnnnnnnnnnnnnnnnnnnnnnnnnnnnnnnnnnnnnnnnnnnnnnnnnnnnnnnnnnnnnnnnnnnnnnnnnnnnnnnnnnnnnnnnnnnnnnnnnnnnnnnnnnnnnnnnnnnnnnnnnnnnnnnnnnnnnnnnnnnnnnnnnnnnnnnnnnnnnnnnnnnnnnnnnnnnnnnnnnnnnnnnnnnnnnnnnnnnnnnnnnnnnnnnnnnnnnnnnnnnnnnnnnnnnnnnnnnnnnnnnnnnnnnnnnnnnnnnnnnnnnnnnnnnnnnnnnnnnnnnnnnnnnnnnnnnnnnnnnnnnnnnnnnnnnnnnnnnnnnnnnnnnnnnnnnnnnnnnnnnnnnnnnnnnnnnnnnnnnnnnnnnnnnnnnnnnnnnnnnnnnnnnnnnnnnnnnnnnnnnnnnnnnnnnnnnnnnnnnnnnnnnnnnnnnnnnnnnnnnnnnnnnnnnnnnnnnnnnnnnnnnnnnnnnnnnnnnnnnnnnnnnnnnnnnnnnnnnnnnnnnnnnnnnnnnnnnnnnnnnnnnnnnnnnnnnnnnnnnnnnnnnnnnnnnnnnnnnnnnnnnnnnnnnnnnnnnnnnnnnnnnnnnnnnnnnnnnnnnnnnnnnnnnnnnnnnnnnnnnnnnnnnnnnnnnnnnnnnnnnnnnnnnnnnnnnnnnnnnnnnnnnnnnnnnnnnnnnnnnnnnnnnnnnnnnnnnnnnnnnnnnnnnnnnnnnnnnnnnnnnnnnnnnnnnnnnnnnnnnnnnnnnnnnnnnnnnnnnnnnnnnnnnnnnnnnnnnnnnnnnnnnnnnnnnnnnnnnnnnnnnnnnnnnnnnnnnnnnnnnnnnnnnnnnnnnnnnnnnnnnnnnnnnnnnnnnnnnnnnnnnnnnnnnnnnnnnnnnnnnnnnnnnnnnnnnnnnnnnnnnnnnnnnnnnnnnnnnnnnnnnnnnnnnnnnnnnnnnnnnnnnnnnnnnnnnnnnnnnnnnnnnnnnnnnnnnnnnnnnnnnnnnnnnnnnnnnnnnnnnnnnnnnnnnnnnnnnnnnnnnnnnnnnnnnnnnnnnnnnnnnnnnnnnnnnnnnnnnnnnnnnnnnnnnnnnnnnnnnnnnnnnnnnnnnnnnnnnnnnnnnnnnnnnnnnnnnnnnnnnnnnnnnnnnnnnnnnnnnnnnnnnnnnnnnnnnnnnnnnnnnnnnnnnnnnnnnnnnnnnnnnnnnnnnnnnnnnnnnnnnnnnnnnnnnnnnnnnnnnnnnnnnnnnnnnnnnnnnnnnnnnnnnnnnnnnnnnnnnnnnnnnnnnnnnnnnnnnnnnnnnnnnnnnnnnnnnnnnnnnnnnnnnnnnnnnnnnnnnnnnnnnnnnnnnnnnnnnnnnnnnnnnnnnnnnnnnnnnnnnnnnnnnnnnnnnnnnnnnnnnnnnnnnnnnnnnnnnnnnnnnnnnnnnnnnnnnnnnnnnnnnnnnnnnnnnnnnnnnnnnnnnnnnnnnnnnnnnnnnnnnnnnnnnnnnnnnnnnnnnnnnnnnnnnnnnnnnnnnnnnnnnnnnnnnnnnnnnnnnnnnnnnnnnnnnnnnnnnnnnnnnnnnnnnnnnnnnnnnnnnnnnnnnnnnnnnnnnnnnnnnnnnnnnnnnnnnnnnnnnnnnnnnnnnnnnnnnnnnnnnnnnnnnnnnnnnnnnnnnnnnnnnnnnnnnnnnnnnnnnnnnnnnnnnnnnnnnnnnnnnnnnnnnnnnnnnnnnnnnnnnnnnnnnnnnnnnnnnnnnnnnngatagccttatagtatatctttataatactatatcttctaatactatctataagctaaagagtaatctctcagctactatataagtagattttatacctattaatcgcctttactaagtagggtattccttttatatcttctagattctcctttacctatctttagctaataaaggtttaggtagccctactattaattagaattctagtaacccctattagggcacccttataaatatctaagataagtatattatatactaatatactttagcccttctactaaccctccctaaggattactcctagtactaccgcggcctatagtatagggttatctatttttttagttcctttaagttattcttctaaagctacttagcttttaggtaaacccttataatatatctagcttccttatataagtaatataagtcctttacctagttatctaattttactctctagtcttacttcctcttattaaaggataataactattcctttcggctatcctataaggtagatagttcttagccttagtctaataacttcttactattatcttttaagtctatattcctattctacctatataagtactacttagcctatagctttataatatataaaggtatctagctctctataaagctaaggtaggctacttatttattatagatctctatcttagataggtcctactattaggctttagtttaaatctcttttaaaatacctatctctaggtagttaatatatacctaatctaataatatagagtataagtagttatagatccctattagatattaggtatattaatatatactctattctagcttttatatagcttactactaattagcttttactttatactataactatactaagtctataacttaggttaaggcctaagttttgaatatatcctatataatctactttataggattattcttttaatattatatctaaccttaggtaaccttatttaagaggaattctattatttatataacccttactttatctaaggcgaactattataggtatcttacttaaaatacttcttattttaccttaaatatatcttacttatctatagttttactatagaatactagtatattaaataggctttatagctccctaacttaggagattttactactttatactatacctatattattattacagtcccctactactattaggaaagattagggtatcgctaatatccttaatatagggtttaggggttctagtacctaggtagtatctcccttaagtagtagtagatatagtatacttaattcctcctctaaggtaatagctgtaagattctaattataaaggtataataagagtttagctttttagtcggtaattataagccgttttttaagggccttaaggtcttactatttagctataagccttcttttattttctctaatatccttatcggaggattctatcggttaggcggccccctcttctataggaatagctctttcggtaggtatagcccctatcttagtagggatttataaatcctatatttagttttcttagctagtaggtagggatatatctccctataatacctagcttctactataggtattttaaggtatcttataggttctagtagtctaatttataaaataaagtaattagaatattaggactagctaccagtatatcctaaaaatagaggttcgaattagagtaaaggtccctagcgtaggtcatataattcagtagactaatcgctaaggttctaaatctcatatacacagtatatatatacccctggcgcttacttagtaagtacatcggcccatataggccagttgtgtaagtgaccctcagggtcataacaaatattgactttattatagggttaccccctataaagtagtaggataaggtctataatatacttataattatagttaatatagaggactaggtcctaataaagaatatatatattaacttaagaaaaccttataagaaactagactactattatataggacccttttaggttataagagtagtagggaaataagcctactaattaatcctactacctaggtattataggatatatcctatataatatatatctttattaaaaccctttaaaggtaacctataaataggctaagagagattagaccctattatagttaatagagaattagaatatattatagaatatattcttaaaagctactataaagaggtagagtatctaattaaatagaaaggctataaagatattaagaatatataggaaccttaggtatatatagaagaaattactatattagattaatttaaaaaagaagagtatataagactatctataaaaactaaaagggggtaacctataaagaagaagaagataagctaagattataaagatactataagaagtagtatatattagtaggaatatgtcagaatctaggatgaatactgtcatttttcatccctgatacagttggatcacgtgactnnnnnnnnnnnnnnnnnnnnnnnnnnnnnnnnnnnnnnnnnnnnnnnnnnnnnnnnnnnnnnnnnnnnnnnnnnnnnnnnnnnnnnnnnnnnnnnnnnnnnnnnnnnnnnnnnnnnnnnnnnnnnnnnnnnnnnnnnnnnnnnnnnnnnnnnnnnnnnnnnnnnnnnnnnnnnnnnnnnnnnnnnnnnnnnnnnnnnnnnnnnnnnnnnnnnnnnnnnnnnnnnnnnnnnnnnnnnnnnnnnnnnnnnnnnnnnnnnnnnnnnnnnnnnnnnnnnnnnnnnnnnnnnnnnnnnnnnnnnnnnnnnnnnnnnnnnnnnnnnnnnnnnnnnnnnnnnnnnnnnnnnnnnnnnnnnnnnnnnnnnnnnnnnnnnnnnnnnnnnnnnnnnnnnnnnnnnnnnnnnnnnnnnnnnnnnnnnnnnnnnnnnnnnnnnnnnnnnnnnnnnnnnnnnnnnnnnnnnnnnnnnnnnnnnnnnnnnnnnnnnnnnnnnnnnnnnnnnnnnnnnnnnnnnnnnnnnnnnnnnnnnnnnnnnnnnnnnnnnnnnnnnnnnnnnnnnnnnnnnnnnnnnnnnnnnnnnnnnnnnnnnnnnnnnnnnnnnnnnnnnnnnnnnnnnnnnnnnnnnnnnnnnnnnnnnnnnnnnnnnnnnnnnnnnnnnnnnnnnnnnnnnnnnnnnnnnnnnnnnnnnnnnnnnnnnnnnnnnnnnnnnnnnnnnnnnnnnnnnnnnnnnnnnnnnnnnnnnnnnnnnnnnnnnnnnnnnnnnnnnnnnnnnnnnnnnnnnnnnnnnnnnnnnnnnnnnnnnnnnnnnnnnnnnnnnnnnnnnnnnnnnnnnnnnnnnnnnnnnnnnnnnnnnnnnnnnnnnnnnnnnnnnnnnnnnnnnnnnnnnnnnnnnnnnnnnnnnnnnnnnnnnnnnnnnnnnnnnnnnnnnnnnnnnnnnnnnnnnnnnnnnnnnnnnnnnnnnnnnnnnnnnnnnnnnnnnnnnnnnnnnnnnnnnnnnnnnnnnnnnnnnnnnnnnnnnnnnnnnnnnnnnnnnnnnnnnnnnnnnnnnnnnnnnnnnnnnnnnnnnnnnnnnnnnnnnnnnnnnnnnnnnnnnnnnnnnnnnnnnnnnnnnnnnnnnnnnnnnnnnnnnnnnnnnnnnnnnnnnnnnnnnnnnnnnnnnnnnnnnnnnnnnnnnnnnnnnnnnnnnnnnnnnnnnnnnnnnnnnnnnnnnnnnnnnnnnnnnnnnnnnnnnnnnnnnnnnnnnnnnnnnnnnnnnnnnnnnnnnnnnnnnnnnnnnnnnnnnnnnnnnnnnnnnnnnnnnnnnnnnnnnnnnnnnnnnnnnnnnnnnnnnnnnnnnnnnnnnnnnnnnnnnnnnnnnnnnnnnnnnnnnnnnnnnnnnnnnnnnnnnnnnnnnnnnnnnnnnnnnnnnnnnnnnnnnnnnnnnnnnnnnnnnnnnnnnnnnnnnnnnnnnnnnnnnnnnnnnnnnnnnnnnnnnnnnnnnnnnnnnnnnnnnnnnnnnnnnnnnnnnnnnnnnnnnnnnnnnnnnnnnnnnnnnnnnnnnnnnnnnnnnnnnnnnnnnnnnnnnnnnnnnnnnnnnnnnnnnnnnnnnnnnnnnnnnnnnnnnnnnnnnnnnnnnnnnnnnnnnnnnnnnnnnnnnnnnnnnnnnnnnnnnnnnnnnnnnnnnnnnnnnnnnnnnnnnnnnnnnnnnnnnnnnnnnnnnnnnnnnnnnnnnnnnnnnnnnnnnnnnnnnnnnnnnnnnnnnnnnnnnnnnnnnnnnnnnnnnnnnnnnnnnnnnnnnnnnnnnnnnnnnnnnnnnnnnnnnnnnnnnnnnnnnnnnnnnnnnnnnnnnnnnnnnnnnnnnnnnnnnnnnnnnnnnnnnnnnnnnnnnnnnnnnnnnnnnnnnnnnnnnnnnnnnnnnnnnnnnnnnnnnnnnnnnnnnnnnnnnnnnnnnnnnnnnnnnnnnnnnnnnnnnnnnnnnnnnnnnnnnnnnnnnnnnnnnnnnnnnnnnnnnnnnnnnnnnnnnnnnnnnnnnnnnnnnnnnnnnnnnnnnnnnnnnnnnnnnncaaaggaaatactaagagcttcgaggatatagcttataaaggaggggggtaatattacaaccccgagggttacttatacaactagcctatataggccgatatatttactaagtaagcgctaggggtatatatataccgtatatatgagatttagaaccttagcgattagtctactgaattgtatgacctacgctagggacctctactctaattcgaacctccattttcaggatacgctggtagctagtcctaacaggctatatcaatagcatcgaccgggcgcttttgtggtagaggacgcgagggagtaccttcttctatatcatagatagcaatcactgcattgattacagtaattcggcgttcagtttctttctcgactatcttccctggtatcgtcaagatactatcgataagcgtcatatactgcagtgtcatatagcctgtacactatagcgcccctataacttctttgttaacaacttttccggaaagttaccgcttactatcaatcaccggctactcattcttgtaccgcttaagattttcacaaatcaatcggtacttttaccatctcacaaatcaatcagtgcttttgccatcccttttcgtttcgtagttactttactacacgattatactactcgtctgtataatcaaatttctggtataactttttgatacctttctcttaagccttctaccgcttacagagtattcgggaataagggctactccgcggtaggttatcgccgaactcctactgtaatatagcctaggtatctttataggtacgcttctgtaacggataaaggtccgtacaagagggaaacacatgtaaacctgcacaggctcgggaaggaacatctatgtcatcatacatctgtttcgatgtcgatccgtacatctttgctattaaaaggggtttttagggtgaaattctaacttaaatcgctaccctggcttagggggggggttagcgtttaaagataaatattgagttttaaaagtacccgattaggtaaaaaaggtattaaaccagctactaagaagctatttttaattgtctccgatttaaaggctttaatttatatagaggggtatactttaaggaattcaagtttattaatatagttaatcctagtctatatttttattttaactaaccggctgtataactgttttactactataaaataaccgatattgagaggttataaaaggtaagaggaatatagtagtatataaattagtataatattattttactcgtaaatttaatcgaattaaggggttaaatagcttctatagctattaagtactaaaagtcgataccttcctactatatataataaagttaatagtataaagagtttctaaagctagcgaagtctaattttattagaagtctaactgtttagactaactttaaaccgctaatcgctaggaaggcctttaaactatgatttaaggaagaccttacctttaaaaataatatatagagggagggcctaccctactgcgtttatatattcaattgcagttacctacttataatttctaggttataaaagtgatctctaactatagtatttacttcttattataacctttactattatagttaatcctattataaatctagtcttatcgaagttatagatattatctagattaattctaaattaaagaatggttttttaaataagattaaactattctctaatgatttttagatctttacatttcgcatacttataattataatatcttaagaaccaagaagaaagaagagggtatcgttttataaaattataaacctatttttcgctaactaaaagaactagggtagttctacactatttaagaagaagattcgccatttctcatactatagagggccggggggctactctataagaatctatagagagaatccatttttgaagagaattctccttagtttctatcaatttctgtaaatttgtgtacgtagtacttcgttaagaacggccagagaggcagtcgcgtaaagttatacgcgggacatcaaaagtatatgtagtaagagtaatcgagctgatatctttattttgaagagcctggatagctaataaaagcctaccctcttactgttctaatttactagcggattgagagcgctttggtggcatggtgggtggttgaactaactaggtactgattcatggacgcgtttttgggtggggtggcgactcgtttacagtggcgactcgtttacagtggcgactcgtttaccgattacgttatgggcctaacgaatgactaatctacaatctgttcttagcgcatctttccggcactgtagatattccggtaaccgaattaccacaggcctgttcattccgacaggaaccaagcatattggcctcaacattatgacgtcacatgataaatctatctgtaaggccgacatcaactctggcagttttgacatcttggacgtttgaggcaagatcttgacatgattaatttcaacagcccagtatttcacgtgctcgctcgttactaccgataagtccctggaccctggctctggactccccaatcatgtccagtcttcacgagctccttcaccgacagcgaccaggacgatggcaagaattccgcgcccggccttgtgtcttcctcgcaaaaatgctttatggttggtacgagcctattccagctacgccactcacaaaacctatcgcggttgtctgtatttccgatacccacaacacccaaaccgacgtccatgatggagacatcctcatccatgctggtgatctcacacaatctggatcttttcaggaacttcaagattcgatcacctggctacgaagcctacctcatcctaccaaaattgtgattgctggcaatcatgacctactacttgattcagcgcgggatgatgtgtctggtcgagcagcctccgagcgagctcaaatcgactggggagatataatctacctcgaaaacgaggaagtaacaatttattgcccaaatggtcgtcaactgagggtctacggaagtccctactcttgccgccatggcaactgggcctttcaatatccccggaatcaagatgtatgggctggctcagtaccagatggaattgatgtgctaattactcatggtccaccacttgctcatcttgacttactgaagtatggctgttcttatttgctacagaccttatggagaattcggccaaggctacatgtattcggccatatacatgagggttcaggaactgagttaatgctgttcgacaggctccaggaggcgtatgagggaactgtcgccgctggagggggcttgaaaaatctactgtttacagcctgggagtttgctaaggaagtcctacgcccagccgtggaagcaaaatgtttacttgtaaatcctgccattgttggagggttacgggataatgaacgaaggttgcctatcaaagtttttatctaattttacaatcttgctgaccaactatattgaatcccacctgtgcaactgtgctatgcatgcttccgtgcccctattatatggactcgtcatttcttctctgcacatggtgatgaatttctcgctttttgagggtatacttatctgtccgatgaatcaccgtgatatgtatcccgatttgtattcatgatagctacttaaataaacaaacccgctgcaataatatcactggatactgaggtaaaacttagtgtgcctttctcctcctaatttttggcatcgcaaacaaagaaaggttctcggaaaggttagctagaccgcagggaaagtacggaggagatagtacgaggttattgctttatttttcaagcctaaagtctctactggtatctcattcctgtgctcaatgtgaagaatcatgtgatatgcgcgactgaacaagggttataggaacacgctgccccaggctacatgctgtttctctaaagtagttgtttccctaaagtagttccgtatgctcctgccaaaatgaattcgagtatccacgaatgactggagatacacgagtcgactggaagctggtagatctgtattcaaaacttccacgttgattaaaatgggtcagtcgctgtccactctccgctggcgtcgcagtgctcgtagcctacaagagctagccgctcgaccagccgcgatacgcgacctgagtccgaatctgtcttgtgaaattctcatttctgccctcgagaatgttgccaaatacacttcagccaagaaccaagacatcactctcgttgtcgttggtggaatcatcaatacaatcttcctcagaagtcgccctgaaactcatgatgtcgattttttcaatgacaatcttccacccgccacgctcaggtgcctttcgaaggcagccaagtccgctttcaaaaggaatcgtatactcggacgggggtggctcaacaaccatgttgttctcttcgtcccatcccatatacgacgtattctcctcgatgaagcgcttgagcagcacgaagttgtttttcaagcccctggacttactctcttagctgctccttgggaattccttttttgtaccaagttgcatcgactgtctggaagaggtgttagcaccgcaacgtcttatgatcaggaggacgcggttcattacttggagaagtacatttcacttcaatctaccgccgctgtagcccagggaactgttaggttttggtttggacagtatttacttgattggaccacagaaacagaggagctgctcccgggtgtgaactccatgtaccagaccacttttcatgttgagcatgatccaatcattcttagttcttaattcttgccttgattgatctcaatacatattgattactcacggtctagctaatctcctgattccagggaagaggtccaaccactcggatgttccaagtttcaactgcgcatcaagttttacggtcttagtcgaaatgaacctctacgtgatgggcataaatagacgattaagtatgtggaatcaagagatgatctcattagctagctagacgtatgaagtaatacgccgcgctaaacctagagagtagatgtcaaacttagaagcgtatttcgtagtacctctccgatatggtgtagtggctaacatcgtcgtctctcacgcgacagccgggagtttcttttgccggcagcggcagcgtaaatagttagcactccgaggcaacctgctgattgactaattagtcactcttcaatctacaggtattgggcccgagtcccaaagttgaaaccctaaattaaggacaagtgtgatgatgaaatagaactatccaagagcagataccgctatttatagtcaacgtcgctgcctaataagcagctacttctacccgtgaccgcccgaacgaacaggagctccgagagctagttcgtcggagtgatagtcacgtataggtctcgcctaagctatagggcaatctagtgggttgcctccgttagccacgataaccctgacacttgaggtaatacatgtaactacatactcgtgattttccccctcaattttagaccgctatttctaagaatctgactgattagatacttttagctacgggaagtgtccgtcccacccaggtgtatggtggatcccaatcattcaatgccatcaaccctctgcgtattctcggtcggtagatgcgtatgttgactatcccaaatcaatcttcgacccctagagcatatacacaatttccggatgaagatcaaccagaagatcaacgactcctgccaagtggccaccgaaatcatttggtagattgtattgacgtatttgtcaaatatacgatcttgataagctaataataatgatatttacttaatatatcgggctttttgatgatcactttagcgaacgggaagaagataagaggttaaataagagaagatgaatactaccataggaagctagataattcactactgcgcattaagatatagaacgaaacgcgaggaatgatgctatctacctgaagcttttagtagatcttacaaactagcgaatatacggaaaagagaatcgaagtgatatatagatatatccgtggaagttgaccgctgttaaagggtcgtttctacgagctacttgctggtgagatcctatacagcgaaccttctgggcccaaacctaacgatccgaataccatcaaagctcaaatcctcctgtgacgatctaggaaggatcgtacttgccaaacgaggcaggaacagtcacgtcctcgtacttgccaaacgggaattaagcgaagacaaacgcgagggtataagaagggaagaacgcgcactcagatagtttctctttttcctttctcctccgtacttagaatttggttgaattacactcctttcttctgaatcgaattggctcgtaacacctccgacaacataaggcagaccataaatttgaagacaccttgaataaatttggttatataatacttccagttgtggttacgtgcacatgccaagatgccgagcgtttcagagggaacggaacgatccaatgacattcggttattgttcagccgaagaggtcagtgcagtggtcgcgcgacttgggtgattctcaccctgattctcaccctgtctatagcgcactcatctttatcacccccgatcgcgcgaccgtaaagcggcgctcacccatttctcacccgggcgacacccacccaactattgactgcatataagccacacgtcggtgagttagtagttgggtgggtgaccaccagcgaatcctcactgttgtatgtttttcttccttttttgcacctgaattagatcagaccaatcactcgcactcgatggtttttttttaagactatgtatgtattgaagaggggaccctgggataggggcaccgacagccctgcctgcgaaacaggtgtgagagcagagtcgtcactgggagtagtagggtgctagagaggagaacacaatggggtaactactgagaagtgaaagtggaaaggtgtctgcgttgctatctccgcctctggggtgcttttatatcacatgaccgcctagtcatcctgctctggaaacccccacgtgcagtatggatgtagttagtggaatgtagtcgcttgtaactttcttcaatcacgaaaacggctgtctccactggtacaggaggcagtctgtggttggccatgtctaccctaattgggatcctttctgtttatttttctcgaggctatctttcatccaaggtctaagtagtccaagctgatcagccagatttcgggtataccccatacatatcacgtgatgcgcttccccacggctttcctattccggccttccccgcacttctgcatatccatctcgcaccccgagcatttcggatagccacggttaagggctatgcggaactggtatggcaatcccggctctttaaaatggcgtttctccccgttttgggtttcctgaattcaagcgattcagcgttgttctcccccttggacttggaattgtgaacccgtcaatcattattctctaagcgtataacactcatcacctaccatttgtcttcggcatcagacagcaaattacattgatcaagaaaatgagtcttcgaacagccgtgtctctcccgcgcagggcgacttgtttctctgcgtccgcagtgaacgcccgacgctggccgtccagcaaggcccgagccttttccacaactacgcaacgcgatgcgacgtgggggtttatcgggctaggacagatgggtatgttttgagatcggccgcgaggacctcgggtatacaacctcggctatacaatggactgtgggatgttgtttccaactgcattatctaactacattaggctaccatatggccaaaaacctgcgcgccaagatccccgcatccgataccttgatcgtgcgcgatgtcaacgaagatgttatgaaacgattcgttgcagaggctcgggaggccgcacaaaacaatggcgcaggcgtcaatgaaggccaagtcgagatcgcgaagagtgcgcgcgaggtcgccgagaaatcggtgagtggctaccacccctacgggttcagcctgtggctgagctagtggcttctctgcataaaccgcgcttcatatacttgtgtccttctagggtctgataaatatgcttatctctgtctgccgtttagatagtcatggttaccagtctcccagagtctcaacatgtcattgaggtgtttcattctatccttaaagatggagcgctgccaccgctcgagcaggagcgtctcttcatcgacgcatcgaccattgaccccgtcacatctaaggatatcgcaaacgccatccacaccacgcaaaccggccgattcgtggatgcccctgtatcgggaggtgttgtcggtgctcaggcaggaacgttgtcattcatgtttggcgcctcttcacaatcaagcgagctgcttgaacgcatccgcagtgtcctcgctttgatgggtaaaaaagcttggcatcttggtgagcccggcgctggcgtgtctggcaagctcgccaataactacattctggctctgaacaatatcgccactgctgaggctatgaacctcggtgttcgctggggactcgaccctaaggcgttggctgaaatgatcaattcgtctactggtcgttgctggccctctgaggttaacaatcccgttcctggtgtcgttgagacagcccccgcatcccgtggatatgagggcggattcggggtgagccttatgcacaaggatcttcgtttggctcttgcggctgcggagcagtctaatactcctctcgccctgggtgctcaggctcgtgaggtgtacaaggctgtcgaggaggagtatcgtggtaaggatttctcggtggtttataagtggttgcaggagaagtctcaataagttctcctcattttaggtgaagtttcctgggtatttttcctttcgatgtctcccccgactcagtacctgctgctctttctcatagatgtggatttcaggatataaaattacaatatagcattcttctactcaatggaattgagtctaggatttccattttgtgtttctacatcttcagagcatatacaatattcaatatcaatggttgatgttctgcagctttcaggtacacgggatatagttgtctctcgccccatgtgacttccctttctctttcccccccaaacacgccaacgcccctcatagctccttctcttcctattcttacgctctttccttatccgacatctgccattctttcttcttgcgtctcctcccatcctctcattccacctccatcctattccttcatccccctatccctccatttactctgccatcggtcctgtcctggcccatttatccccttgtcgatttcaaggtcatccagactttcattccgtatacctcatccccacctacctcttccttcgtttcgagttatcatcagacgccttgtagcctgaacagacggaaggttgcatcctcgacaacaagtaagtcttccactcaattttgccatgtcctactagcctaccggtcctcgttctggctgacactggcacacttggatagcagctagactttcttctcagaattgtctatataatttggtgcaggaactcaggtgagtttcctgcggttggcactatgccattgaggaattttgtcaaatggaggctaaaggggctgcccatcaagccttcttcttgtctgccaattccaaagaatcagctgacaaaatccttctctttcagcatacgcccttcgtcatgcaccctcagggctctcaacacacaagctcctctggttctggctcttgtcagacatcaagctcccagtctgcacaatacccccaagagcctcgtacaccctatggtcccaggtaccaccaatctaccaatccgagttctattgacagcagtggtgcaggcctgaccaatcttttcagaggattaaatctgcagaactctcgtcccaaattcaacggctcaaagggcaccgcacccgttcaaatgaacacaaacatggactggtcgaataccaaccgtgcatacaacagcccattcatcctggttccgaattccaccgttttcaatggcgttccgaccgtctcttcctttgttcctaacggtgtctctggtcagactgatcagatgggccaattctcgtatcttccaacgggagtctaccccaacgtcaatcctgtgatggctggtggatactcgtcgtggccctacatgatgaactacgacatgcaggatgggacgaccaacaagcaagcatgggtgtctgagggccagaagggagttcagggggagaacaatggacaaataaattactatccctctgctcttgtttctggcatggatggcagttccatgtctggttactcttatggaggcatggttccctcgcagcttgggtcgctctcgcttcccctccaaatgatgaagactcccaacggttacgtcgttcaagatctggaggctctaactcaacaagatcctgccatcccacgcgcggtgcctgccatgtggactaacccgtctgagctgacactcgccaagtgtctggaaaatcgcgagggtataaccaatgtctacatccgaggattcctgcccgagaccactgatgagatgttgcatgcctacgcagctcgtttcggaaagattgagcgttgcaaggccatcgtggacctggataccagtctttgcaaagggtacctactccacaaaacttctttccgataatttattctaatcttttgcagattcggttttgttcagtattacagcttcgaatcctgcgagaactgcattcgcggtttcttttacctcggctaccaagccagcttcgcccagaagtctcgcaactctcgcctgaaggatctggaggacaagtcttctaccaatatatactgcaccaacattccaatcgattggactgaagccgtgagttatacaaacccccacacgcttgtctgtcctgttgaattctaattagtttatcaggacctgcgtcgtcatttcgagccatggcgtgtggtttcggaaaagatcagtcgcgatgagaagacaggtgtgagcaaggaagtgggctttgcacggtaaaaaagcaaattccttccttgactctcatgaccttttctgactggtttacagcttcgaaaaccgtgatgttgccgaaaaggtcctgatggaattccacaacgtcaccaaggacgatggggtaaagctgcttctgcgctttgctgataccaaagcgcaaaagatcctgaagcaacagagcaacgaacgtcgtgcttaccgcgccggagaatataactactcggttgaagtggttcagggatctactccatcccctgggatgaaacgtggctctcatcttactccaaactctcaagtcagctatacctctccagctggtgtgggcgctaactggaccccggcaacttccatctccccttggtatgtctaaatacttgaactgcattccaaaactcattctaatcgagctcacagtcacccgcacatgaagaatccatccagcagtgcacgaagcagttccttgtcgtctcggagcctcaatgctcttgaccacacgcccgcctatcgcagtcgagccttgtccctgaaccgcggctcttacactgatctctctggtggttcttccaagaccgccatgccggactcgccgactatggggtctcgtaaagagaacatcagagcgggctctgtatcccccgcttcttcttctcccatgatcattctctccccagctcgctcgtgcacttaaaccagccgtgcaacgtgctcccacgcatatatgtatttgcatgggatgctttacatcatcttatcactcggggtaagatgatcagcacctctccagggtgctctccaatatccaaatgcgcagcatctgttaccattcgcagaatgtatcgacgatgtatagctcagccttgcttttttatgattgttctacgattcacgattcatgattcacgatatgatattcggttgctttctgtttacgacccttcgtggcatttttagatgactctacgcggtatcattatggagttcgatctgcatttttatcaagtttcatgggaggatgggaaaagctttttttctttctttcgcagttatatggactttacatgttttcagcatatgtgacagacaagatgcatgtttcaagacttcgttcaaagaacgctatcgcaccttattgggttgcgcagtctaatatgatattattcaagatgaaaaatactccatgtaaggtccatgttcaagatccaaagtgcgtgagcacaattgtgacgtggagggcaatctatccgaaaaggctaatgagataggaatctcgatctacacaggtaagacaatccacattattcgggtcaattgcgcccaagtctctcctccagatcctcggtgagctgataagcaggaagatactgtccatcaagctgagccccaagccgcaatctcggattaggatgggtatcagacgtgccaccaagactagtatatccctcgtcataaagcgaacagtacttcaaatccagatgccgaatgaacgcccagatctccgcataatgccaatcaatcatgggatgcacgcgtacgaaatccggccaccccccgtccgtccgatcaaagtgcgtcagctgtgtgccatgcggatccgtccgccgcgtaccaacaaatatcgcccggatcccagggtggtgcgccagataatcctcaaagctcgagcggagcgtcgaagccggcggcgcagtcgtgtactttgcaatatcgagatgataagctttagcggaggagatgacgaagtcttcgacttcatcgaagggatcaggtgggagggcataaatcgccgggatgaccttcgccgcggctatctgggcttcggtgtcgaggtctgcgggggagggggttgtatcggttgtgtttgcatttgcggtggggtgtgggtcattgccggcatggattggatgcaacccggccagaaacagaattagcaggactagacagtccttgccgccgttgtaggagacggatagttccgagagcttgtatcgctgcagcgcggtgctgactacttctagggagatgcgcgtctgccgttgcacggaggccagcagcgtgtccggggcgtggggttcgtttaggaaggcttgtacgcgggcgtggatgcgtgagatcacggtggggagaggaggaattgtttcatcgctggttgagtcgttgaggggttgtttgttgctgtgaggtgttccattctggttcggctcgggctcttggttgggaggggctgatggtttcaatggttcggatgttgctggtggtagtggtgggaatggttgaaggtgatcttgcggccggaaaggcgcatgttttggagttgtttcagtcatgcttgtgttgaggtgaggttgacggagcgaggtttggggcggggtgtgggtttctcggggagacacaacttaatccactgcggggatacaaagccgatgtcaagcatgtgtagacatactctatgtatacatagatctagataattgaaggtcgatataaaccaatttgggaacttcccggaacccccgcgcctcaccgcggttcctcggtggaactcggtagattctcgtggatctggataccgcgaacagcctaggcatatatgattcatgatacaatttactgaatgcaccttgaaaaaatgcttaattgcggccgtggccgtgacaattcataagtagatccctagacgccggtaacgctcagaagggaaaaaaaaattaaagtcaaatcagcccaacaccttcatcttcttcttcttcttcttctcatcaccaccaggtttgcgccccttctggaaatcccgccagctaccaatgcgctcttcgcgcgtctcctcccacttcttgtcattttcgcgcttgcgcttgcgtgcctcgagctcttcttcttccttgcgttgctcacgaccttcctcctgcaaacgtgccttgagctgtcgccggcgtcgcgcttcttcatccaatagcacgctgattgtcttcttccgccactcaaccttgaactcctcggttttaagctcgggggagtcgagtgtgtacttgtgttcacgaatcaacaggcggcgcgcatcggagatacattcgtccaggtattcgcgttgcttctcgtctagaagagcttcctgtgccttattgaggcgatcgaaggcatctggagcagcggggttcttggtcttgtcggggtggatcaggagggagatcttgcggtattggactttgatgtctttttctgtaacaccgggttggaggtccaggacggcgtagctgcagtgggttagtgtatgtaaaatatatagaggggcattattctattgtagatattaagattagacgtacgaatcgagcttgaatgccgagcgaatgcgatcgatctcaacatcctgtgtcgcgtgtcagtcgcaatctagatgtataccatgtggaggagggcatacctttttaaactcggaggcctctttctctagagcttcgagaaattcctggtctggctcgtcgtccgacatattgccttctgcggattcttttgaggtaggaatgttcttgcgctcaagagagtacgacctcaaaaaagataagacagcgggcttatcggtcgctgagtcagcgcccggggccccccccccggcccccccggcccacaacaaaaaaagaagnnnnnnnnnnnnnnnnnnnnnnnnnnnnnnnnnnnnnnnnnnnnnnnnnnnnnnnnnnnnnnnnnnnnnnnnnnnnnnnnnnnnnnnnnnnnnnnnnnnnnnnnnnnnnnnnnnnnnnnnnnnnnnnnnnnnnnnnnnnnnnnnnnnnnnnnnnnnnnnnnnnnnnnnnnnnnnnnnnnnnnnnnnnnnnnnnnnnnnnnnnnnnnnnnnnnnnnnnnnnnnnnnnnnnnnnnnncgcgggggccccgctgccggacctggcagcaacatacaagagtagcagtctccttgtctctctcattagcgaagactatcattgtcatgtacaaacatctagtcggccaaaaatcatattagatattccatccaagacacgattacaaataagctgaagacatcaaaatatctagtagttattagatatcagagctccttaccgctttccctaccgcctttgtttttcgctcccaagaagaaaaaaaagatgttttcaccgcccgctactttcaagattcaactcaaaccacatcatggcgccacgagcagttaaagggaagtcaaagcctcaccaggagacaggaagggtcttgaaacgaaagcgtggcgaggatagcttagctacactcatcaagcaggtcgaggacctcgacctcaaaacccccgtcaaaaacttctccgatctcccactctccgaaccaacagccaaaggcctcgcagcctctcattttaaaactcttaccgacattcaatcgcgtgctatcaatcatgcgttcaagggacgcgatatcctcggtgccgccaaaaccggtagcggaaagaccctcgcctttctagtgcccatcctcgagaatctttatcgcaagaagtggactgagttggatggtctcggtgcactcgttctctcgcctacgcgtgaactagcaatccagattttcgaggtgcttcgcaagatcgggcgataccataatttctccgctggattgattatcggcggaaagagtttgcgcgaggaacaagatcgtttaggacgcatgaacattttggtttgcacacccggccgcatgttgcagcatttggatcagacagctatgttcgagacgaataacctgcagatgctggtgctggacgaagccgatcgtatcatggatatgggtttccagaagactgtcgatgctatcctcgaccatctccccaaacagcgccagactatgcttttcagtgccacacagaccaagaaggtcggtgatttggctcgtttgagtctgcaggaacctgagtatgtctcggtccatgaatcagccgcctccgccactccctccactctccaacaacactacaccgttactccactcccgcagaagcttgacaccctttggagtttcattcgcagcaacctaaaatctaagacggtggtcttcttgtcatcaggcaagcaagttcgctacgtatacgaatcactaagacaattgcagcctggtatttccttgctccatttgcacgggcggcagaaacagggtggacgattggatattaccactaagttctctcaggctcaacacgctgtccttttcgctaccgatgttgttgctcgtggtctggatttccctgctgtcgattgggttatccaaatggactgccccgaagacgccgatacctatattcaccgtgtcggacggacggctcgttacgagcgtgttggtcgtgcggtgctcttcctagaccctagcgaggagaagggattcctcaagcagctcgagcacaggaaagttccgattgaaaatatcaatatcaaatcgaacaagcagcagagtatcaagaaccagctgcagaatatgtgtttcaaggatccagagctgaaatacctgggccagaaagccttcatctcctacgtcaagtcgatttacgtgcaaaaggacaaggagacctttaagatcaaggagcttccgttggaagagtatgcagccagtctgggtcttcccggtgctccgcgtattaagttcatcaagggtgacgatgcgaaggagcggaagaacgaatcttggcgaatggcacaaatgtccgatgatgactcagacgcaaagacgaaggataagaaggacgagaaggaagtgcggacacggtacgaccgtatgttcgagcgacgcaaccagggcgtgttggcggagcactactcgaagctcatcaacgacgatggcacgatggtggctaccgatgcccccaaggatgccgtagaaatcgacgacgaggccgacgaggatgccgacttcctctcggtcaagcgtcggttcgccgcaggcgatgcagaacttggcgggaagagcgattcttccgactcggaagattccgatgcggagccaaagatcaaagacaccaagggtgtcaagatggtgcacttggacggccaggacccactactcatcgactcgaagcgacgcgagaagctgctcaagtcgaagaagaagctcctcaagttcaaaggcaagggtacgaaattggtctacgacgacgacggcaatgcccacgaggtgtacgaaatggaagacgaggacatgttcaaggcccgcggcgacgccaacacccagcgcgagaagttcctcgaaggcgagacggagcgcacacgccaggccgatatcgaggacaaggaggttatgcgcgagaagcgacgcgagaagaaggagaagcgcaaggcgcgcgagcgtgccgaagccgaggccgaggccgcgatgtcggaggaggaagacggcctctcgcatctcccccatgtgcctttcgagatccccggttccgattcagactctggctccgagcgcgagccacggcccagcaagaagcagcgtgtctcttttgccgagccggacagcgacgacgacaagcccaagagcaagagccaggcttctgccaagcctatcgaaacgctgggagatctggaggctctggccagtggattgcttggttaatgtatatttcatggtttcatgtgtttgaggtctttgatggcgtatgttttccaaccaaaaaaatctctttcccggcgaggttcaaaagcatagtgaatatgaaagcgataatttccagatgtgtataaactatctcatacatgtctaaataagctctaaaagcctcctaaatgtagtatgtgtgcctgaactacctactccgtacctgtaaccctataaaatcttaccccaacaccaaatgtgggggcggacatttccttgacacatcaacgtcacatttcgtacgttaagccctgtgtactcatcgatggcttcaatcacgccatcgaggaagaaaagtcttgctatgtggtttttatcttcatcgtgttcatcttgatctcaactgttcccggtcaatgtgcctaatataacttagtgctaccataaacgccaaggggttgttgccaagtgtgggtcacgcgacttagggctgaatcgtcttagttcatacataccaacccggacaggtgagagatgatattgtttgacctttcttttcatgttttgtgctaagacaaagttagtggatacctccgtatccatattcattctatatcatggccgacatcgagaaatacccggcagcagagccctccaaggttccagacacaaaagccgatgatgtcccggcaaacccatttgtcaacgcagacaagctggctcgccgattgtctgggcgtcaggtgcagatgatcgcgattggcggtaccatcggcaccggtctattcctcggaacgggatcgtcactttctaagggcgggcctgcttcgactctcattgcatatgctatttgcggtggtattgtcttcatcactatgctgtgtctcggcgagatggcggcatttatgcctgttgctggatctttctgtacttatgctgggtgagtattagttacttgttttttcagccggatgattactaacttgctctatagtcgcttcgtggatgatgcgcttggattcgcattgacttggaattattggtttaatgatgctgtctctactgcatcggatatcattgctttacagcttttgttgcagtattggacggatcatttcccaggttgggcaattagtctaatcttcttggttgttgtcattttattgaacgtcctatctgtaaaggtttatggcgaggtatgtctagatgacttacactctattacccacctgatctaactgtccctatctaggttgaatactggttgagtttactcaaagtcatcactatcatcgtgagtgctatcccttacacaatacgcgcacgcccagctaattatctttctagatcttcattattctgggaattgctgtgaactgcggcggaaatacagaccacgaatatatcggcggcaagaactggcataaaggcgatgcacccttcgtcggtggaatcggtggctttgcatccgtatttgtcacagcctccttcgcatagtatgtgaactcattttatcattggttctgctcaatgagctccattctaacaatcgaacagcggcggcaccgaatccatcgccatcacagccggtgaaaccaaaagccccgcgaaaacaatgccaaaagtcgtccgcaacgtcttctggcgtatccttcttttctacctcctttcgatcctcatcgtcggcctaaatgtaccgtatgactacccaggcctctcagacggcgacacaaagaccagccctttcacaattgtcttccagcaagctggttccgctgtcgctggcagcttcatcaacgctgtcatcatgacttcggtcatctcagcggcgaaccatgccctcttcgccggatctcggcttctattcactctcgccgtcgatggatatgcgcccaaattcttcggtcatctcaatcgattccaagttccgtgggtggctgtcctcgcgacatctgttatcagcggtctctgcttcggggccagctatatcggcgctggaaagttgtggtcctggctgcagaatatcgtcggcgtatcaaaccagctctcgtggatttgtatcggtcttgcttctctgcggttccgctcggcgatccgggctcaggggcttgagcatctccttccctttaaaaattggacttatccgtatggtccgatctttgctgtcgggcttaatattgttctggttctggttcaggggtggaagtgcttcagtccgcatttcaagcaggtcgactttgtttcgtattatattgagattccgatcatgattgccatgttcctcgcttggaagctggtcaagcgaactagctttgttaggaagtctagtatggatttgatgacggaccgatatgatccttctcaggaggatgggtacggggatgggcctgagggtccggttacggagaagaagaagggtgcctggcgtaaagctcaacggtttgggcagtggttattcttttagtcttgcttttctttattctgtgaaaaatcgtatttcgtttcttccagttcttaggctttgtataacacctcttccactaagccgttcaagggtaagcttgtagtcgcttttgacacagcggtgtcgtaggctgtttcaatgcaatccacacacgacgcagctgctgctttgacttgagattctgtacagagtagttctgtactgcttgttggaacatagccgagaatcatgtaaatctaacctatactttattccatggtgctgcagttcatatcaccgatctatggatttttccaaagttggctcgcgccgtggccactctgaataggatgatatcgctcggcgtaggtgatatagtagacaagatcgtcggatatagtacggagcataacggagtataaactgaaccgttttaaccttacagccctaggctaacgagattttaagaggtttgaggctcgacgacccattctatatgatatgaattttaatggcggtttccgtaacgttgtagcttggttcctgtctctgtagaaagatggcaggattagctacacttggagaaagggggaaccctcaaaaatggaggacaagaaaaaaaagaaactccgatagggggaatcgaacccccggctgccgtgtgagagacggcgatgttagccactacaccatatcggatgaggactgcgaattactctcttaggtttagctttgaccttttgggtttagctttgaccttttgggtttagcgctctttgtccgtgtgcgttcccgtgcgtggttctataaagtcctccctttaaatttccggctctcctactcctcctttcttccccagtgggagcggaaaatatagttccaggaaatgaggagtgggccttgggtaacaagatgaagctgaagtaagtttacattgcttctatatctactattttgtacagagaacgtcctcggactctagttcactaatactcagggctatgttttgtacacagactcgctcgcggggttcagccggcattcgtgccggtgtatcagtcggaccgcaaaagtctccgtacggtcgggatccacacccgcgttttttcgcgaatacttatgttgtacaacagtctaggttgtatttactaaaattgaaaatgggagatatatatttgatggggggtgggtcgtacggaaacttttgcggtagaactgtatttagacttctctattgggccggggtgggcctaggcttccgcaagacccaaagcccaacccacgatgggccgggggtcgagccttcgggcccaactcggtcttcctgctgttaacagtgctcgcccagcctctagtcaccagcctctccaacatctccggtcgcatatacctactctacagttgcctcttgctgttcgcagctggcgcggctcttgtaggtgcagcgccgaacatatatctgctcattgccggccgggtcgttcaggggattggcggtggaggggtggatgtattgacggagattatcgtcgcgaggtaaatgggaacgaattgattgggttgtgatggtcctttttgtcgttgggtctaccgccacaatcgccccccttagctgggggggtgttctttatccatggagggcgtggcagacatacgtgccattaacaataggtccgctgctactaggagtccttgcattccatgaataccgcacggaaattcccatgtttcctcatcggatcctcgcaggcacaaccccggcgtgctgcatgatcgggtctctaatccatgggctgataacagccgctgttatctacattctccctctttattttcagggagttcaacaggaatcaccgataaaatccgcaataagtgcctttccattcagctttctggctgttcctagtggttcaatcgcggcgttcctggttactgcctgttcccagtacaactggatcatgtggacagggtggattaccatcagcctgggcgttggcagtatgtcactgttgggcttgcaatcctccagaagccttcaattcggcctccaggtcccgggaggaataggtgtgggcgtattgtacacaataatcgccattcccttgcaggcgacgatgcacgttgatgatgtcggtcttgcagtgggcactctggtcttcttcaggctgactggtcagattattggtctggcaatcagtgccgccatcttttctaatacctatactactcgtgcttcgcgctgggagaacctgccggcgatagcggagcagttcagagacggtagtgcggcagtctacgccatcggaaaattatcgtctcttgacggatatccgttagtcaaagataaaatacttgaaacttacgccgtcagcttacattacgtctggatagcattggcggtcttggcacctgttgggctgttgaccagtctcttcatcgggtgtaaaccattgaaaaatgatgagataggaaggcagggatttgccgatataaggcttcaggagcaaaacatctagcattgtataatagacaaatcattattctatctcaattggttggatgactatctatcccgcagcgttaagaccgcagttgacaggaagaatagacaccttcaacgtgtgatcactggcaaccaggatggatacaatcactcgctcaatataggtaaggtttctgagttggtccgcatactaccgccggccacagacttcccgtggtccccgtcggactcggaagccgtcgctctcggtcacacccacgtatacttatgccctccatttgccatagcccggagagccaattcatattcatatcaccgaccgtcaggaacgaccggacttatacttcgggtttaatgaggctcagctcacaaccgccatccctgtctccagctactggctgtctgcgacattctacgaaccgctccgactacttcgatcttttccccgagtatcgcctgcaaccgacggaagaataacgccgccgcaatgtcccctcgaaatctcatgtcatcaagacggtcctgaccctacatgtagtaccgcagtcgatccccacgttgcagcgagcttcaccacccgaggcaagtcgcttcgttagactaaggccgagcgaattatactctgtcggggcttacaagtgacgactcagttgaaataatacgccaagcattatcactagacccagttgtatttaacgacagccatcaagcatgggcaaatagtaagggaacgacccttcttgaaacactcaagactctatcacaggcagtcaaagatctccagaaaagggccgatacccaggagcaaggacacacaaaaacacctagaggatatacaaaagaacctcgaggatacacaaatagacctcgaagaggcacagaaagccctcatcaaatatgagcggacgtttgacgcatatacaattgaggtgcagtcaattgtgctggataaatgggctgggaagtctatcagtaatactaggaggtctcagcggaacgctgctgcccacggtggtagtatccttgccgattacgacgtgatcctccgggaggtggactagccaaactcgagggtagacctgtggaagccggcgtttgaatcccactatatccaaaatgcttacaatttgcttaaggccttccagtagactttaccggatagctactggcaaaagcgatgcgattgcagcctgcttttcgaggtcaagaagttaaagaaggctgatatacaggtagattggtaggctcttaggttagatctgatcagccttcttatcgaagacgaattaactagtggcctaagaaaccgcgagcgcgtcctttgatatataaaccatattgagaggagatttatcgaattagtataaagtatttactcgtctaaaaagtacccgccaagaacggccttactcagagtagttaaaaagggtatatagctagtaatttggcgtgtgtgtatagtaagtctcttttaaagaaaaatctattcttgtcttggatatatatatgccagaaacaaccggacactgttatcatttctatcaccacctggggagaagttgacgtatccacagcaaaagacgtttttatcgggaatggaactgtactgctttctgtcatttgtctgcgcttgttctgtagacaggctgcgacggaatactcatgcaatgactcgcgtacattaaactcacagaatcgagaacacgttgcaagtctgccctgctcttgcacgcataaaacagcatcacttcccttgcgccatgaattatgaggctcataaaacttcccctcgtatttttgtaggacatccgttcgcatgtactatatgatcggaatctgcgcaaagttgtccacacatctatagaacagctatttgtggtactttcctggcacacctggaggaaaaggcaactgtaaatgtctcagtctctcttattattcccattaccagaccagcaaaattttgcctcctcaaattggcagttctctcactatcacaacttaacaccgtcttattatccaaagcccttcaaatgaaagccaatgtgttgtcccttcatgaaatgacagcgatggccttgagaattttctaacgcgctgcccttaacaacatcgccagtggtgttatgggtcaagacccgtatgctctccatagatacgaatttcgattttttggcgaaggcagtaagatgcccactgattgactgagcaaagatggttgtacttctccggtgttggagagaaaagaagatacaagaactcccaatcggagacatttaagcgacgagtcctcacatacaatcaattttagctcgtgattggttgcgtcgcggttcatacgcacagtccaatcagaaatggaattatcagaaagaccagacccacttacgcgactgattgatgtatagaaccacgtgagtggacggcaacttcacttgagaattttttttttcattcaatctcttcacaggtctaaagaagtgaaagaatgcgccgatataacataccgatgagtcacagctcaaatgagggcagggttgagcttgaggctgctcttgagaaccctgcggatggcgacgtcaacttggcctttccagaaggtggccgagacgcataggtctgcttgctaggatcatgtctcatgatattcccctcatttggctttcagactgcaggtgaggatggaccatactctttttgacctgtcgaggacacgatgacttacactattgatagttggatccgtccaggattatatcagcacccaccagttggctgaatatggagagagagatgtcggctggatcactgcagtgcttgtattcctgaccttgtttctcggagttcaagctgggccgctctttgatcgatatgggcccagagtcttgttgatcagtggatcacttgggagtttcgcttcctacatactgctcgcagaatgcaagaagtattggcactttatgctctgccttggtcttcttggtggcatatctgcagcaattgttacgacagtctccattgcagttctcagtcactggtttagccgaagacgcgccctcgcttccggaatttgtatgggaggatcatctgcgggtggtgcgatcatccccttgatgttacgaactttgtttggaaaatatgggtgcatatgggtcatacggaatgtagcctttatggctttgggatgctacatggtgggagtgctactcgttagaggacgcctaccccctggcagcaagaacagagtgacgatcgaccttgcagctttcaagtcaccccgtctatgttttcttgctgtggcagtcttttgtttcgagttcatcatttttggatgtgctgcgcttcttccatcctatgtccgttacagccggttctccgtggatgtgcaattttattccctcactgtcttgaatagcatgagccttctcgggagagtcctccctggctttgctgctgatttatttgggcgatttaacattttattatccttggttgtgataaccatcgtgataatggcgggtgtttggctaccatatgtaaacttcctgctagccctagcgttcgagtctataccttggctttccatttccagttccagtccaaaagagcccatcgggacaagatgacgctgagaagtccaacgagcataatggcaaagtagaacccaatgagaacctgtgaaatgaagttaggactcggtgtgagggacggctcataggtgaaaaatacgtttcacgctgtggttgggaacagagtaactcggctagtcatgcgtagggcgcgcgggttggcccacccatcattaattggttgaggttgcctcacttggatacgcttatcccgccagcgctttctattggtcaaaccttgataccaatccagccaatcagaaaagggggaatttcgtatctcactattgaatcccggacagagaaaggtacagatgcaggaaatatgaaatctatacattcgcatatgcagacgttcttaactagagagttgaccggcttcttacattcttctgcatcatatgtgagtaaagcttcatgctgacgataaaattacctgtaacatcctgacccgggcccgcctccattggatgacaggctgatcacattattaacgtctggtcctcctgggcttcaccaacaaaccgatggcattccctatgtgccctccactaaatgtaattcacataatcgaaatcttatgatgcctggccagatggctcttatatccaggaagagacatccaaacactcaaatatccagcaatatcacattggcgacccgggctttcgaaaatgtcctgaaggtaatgacctttaaactaaacctgaagtatagcttctgttgtctgccatgaagatagctccccactgtggagtatgtcgtagaagcttatgttttgaaggagctaggctgggcgctattctggcgttacctcgtgaccttactaagggacggcggcttcaaaagtggggttctctttattactttgctctttggcccgtcgaccttgccagtaggggtacgttttggtcacgacttacggctagaaaagaagattccagatatctattaaagatataagtccctgacgtagatatatattcgcaagaagacattagagctcaagcaaaaataagtttgttttcaaaactcgcgaatcatgcggtggactgccatctcctttctccattggaggagattctggatccgtccggggtcaaagcgcggggtagtgcccgtccggggtaaaactcgccgaacccatagcccgcggatgagatgacaccgagaggtgtcctactctgacattcgtcgagttctttgaagatcgatcatatttatcttgcattctacgtccaatgctccctagtgagcatgatgccctacagacatagagagatcaagcatcatgagcatccaacttcatgttcggaggccagcggtcgaagacactctgaatgggtcacgtttgctgatcatttgcccattctcaggttaaataactagcgcttacgattaacctctcccggctcctcggttaaattccaaggtttattcgttcattatgataggctcgacatgaccgggctaccctgacagggaatcaggagggtcggactttagagtggacaacaagaaaaaaacctgggacgggacacagacatgactcgcattcactgagcgagggaggattctggattctcccctaagatccaaagaaggatattctccggcgaatggaacgccacatctagacgtataccaccacatttcagcataccccgcaaagtaaccaggatatttcctccccgctattacctatcaggactagtccatgtccgatcacttcgcttgacaagaacccggcataatcaagtgacgctgctaccgtagtgcccggggaaatgaccctcatgcaaggagttgccgggttgaggtggtcaatgtccggagcaagcttcacccaattgagctaagatcgggaccatcatcacgagcgtgtcgccgcaggtataaagatctgagaccccctgtcatgcctgcccctctttcattcacccgtttctctcggaaatcgtcaacatgaatagcgacatcacagagaagcagacctcagcggaggagatcgagggacagcccacatccatgggtggacttgtctacgatgtcggtgagaaggcccactacgacagagcgggcgccatcgaggccgaggtgcttgaacatagtatgactgtgcttcaggctgtcaaggcctatcccgctgccagctggtgggcattcgtgatgtcatgcaccattgtaagttcctgctcgagataggcagatcatttccgtaacgttgaaatagatcatggaatcatactgtgtcttcttgatgggacagtttatagcgacagctcaattcgccgaggattttggtgtatacagcgaaaaaacaaacgagtggattatcgaagcttcatggcagtcagcattccagtgtagcgggccaatcggtgccttcatcggtgtgttcatggcaggtcccattaccagttggattggatatcgatgggccaccattggtggtctcatgttcttgaacggcttcatcttcatcttcttcttcgccaacagccagggtatgtttttcgcgtcccagatcctggaaggcatcccgtggggcatttttatcgccaatgcacccgcctactgtgccgaaattgtgccaatgagattgagagctccagcgacacagatgttgcaaatgttctgggcggttgggtcgatcatagtcggcggtatcacttaccactaccaatccaagaatgactcgtcagcgtacaggttcgtccgctcccatagatgccatagaggagcactgtactaacactgatcccagagttcccattgcaatccagtggatttttcctactcccctcgctatcctactcttcctcgcacctgaatcaccctggtggctcgtacgaaagggccgtctggctgaggcagagaaggccatcaaacgccttggacgcgcgagtgcaaatgataatcccgctgacgcagtcgcaatgatgcgtcgcacgattgaactcgagaagactgagaagaagcccagtcttattgaactgtggaaaggtaccgatcgctaccgcacattgatagtgtgcggtgtatacgcatctcagaatctgacaggcaatctgattgccaaccaagcggtttactttttcaaacgtgagtccagccatttcctgcagcttcatggcatactaacaccagctcagaggccggcatggtagacaacaccgcatttgcacttggtctcatcacttctgccctccagtggatcatggtcatgctctcttggatcctcactacatacctcggccgacgcaccatctatgtttatggtcaattcatcaactgcgcattcttagtcgcgctcggtattgcggcttcagttggcactagtaacgcggctagcaatgcgcaagcgtcgcttggcttgatcgtctctgtcctgttctgtttgggacccgcgcctgcctcatgggttatcatcggggagacatcttccgttcgtcttagaccactgacaaccggtgttggacgaggtgcatactacttggtcaatattccttgcatcttccttgccagctacatgctcaacactgataagtggaatctgggcggcaagagcggctacatctgggctggtaccgcctttttctgcactgtcatgtcttggatttgggttccagagatgaagcacagatccttccgtgagattgacattctgttccggcgccatgttccggctcgcaaatggaagcagacggtcatcgatatccgcgatgatgagtagatggaaattgcggtttggaggttgctttagggttagcgatcaatggaatattcgacttaaaggatgattgatcgtcttcgaggccatcgagtcttaattatatacctgggggactagtgctcccaccctgttacgattcacgtcataccaccccctttcctatttgggaatggttaatgcctgatacaccgccttagtgtttccctagtaagacggtagatacctacaatttgtatgtaaacactaacaaaattaagtcacttttaccacatcaactacgtcgtcaactacttcaaaaactacttcaaaaactacttcaaaaactacttcaaaaattgctttatcatcatcaagggattaaggcatgtagttatgagacaaaatacacgttttttcctgatcaaaatgtaggtttttttgactcagtctcgcagaattaaattgatgccttatgcgtaaggcggaatcaggcggaatcgaggcggaatcaaggcggaatcaagcggaatcaggcggaataatgcagaggggggtccctataagttataacaatccccttcgtatattatcggaccttgcaacccttcatgtatgctattgatcaaatctatacgcctcatcaggtgtgactcactatccgcgatagatcgctatcatgcttcatgtttgctggcttgcttgctatttgcattacttcatccgattgttattgtttgccacaggctaagcgagatgttcagaggttttcaatatttgcaaagagacagctatatcaacaagctgcttcccacgtttgcaacttgcttcttctttctctccatcttggttattctgaattcttctctcttgcaagtatgttacatctaatcctctcatgtgatcaactgactgaggtaccggcgtggcgttggcacggtatctgtcgaggactcgagggcatagcgcctagtactatgttccgaagtgccgtctcctcgtcgaggtcgggttcaagattgggtagagccacggacctggaagtcgagtacgagactgtacccaatcttgaacccgaccttgccgaggagataatactagtcgctattcccccgcctgagcattctccagccccgacagataccgtgccaacgccacgccggcaccttgccctacctactatccgggccactcccatttcaggagtaggcacgacatttgatgcgccatgagtcgggccgtttcgctcgacaccctcgcttatatctctgccgcagaacttcatgccgccatttccagctttgaaatcaaagatgtcgagaaggcgttgaaacttcgtctagaccaaagagacaaagaaacaaagagcttgagcaggttactcctatttctcccacagctcctaggtatggtgttctgaagatcaaggtattatagaactaacatgttgcagtggagtatctgaagctgattgatgaagcattgaattgatcgccctccacggaagccagtgtagggtggaccatcgatgccttgctactcaatgcccattcaatcgtagcagagcgcacatcctccgcacgctctatcaacgtccagccagtgcgctcgtatacatatgggccggtgcgatcgaagggaagaccgtgcgacaatccagcctatgtacgacggcaaatgacgaccacaatccacgaacgtacgggttgactgtacatgcggacagatttggttatgacttacgccgagaacggtattcacttcacacccgttgccagaatatttctgggttccacccgaggagtggtgataaatctaaacaaatcatggaccgcccagacaagatcgcagaagatatttgggagttaaaagagaccgcgccgtacatgagaatgacatcggttggcctacacgactgactccttctatcaaacgactcacctagagccggcaccaagccctgatctgttcgattgattgcgcttgcgtctacggctcctggttgctcaaatagcttgctaatataacttggttccgaattttcttgaaactatgagccgctatctcgtttaagtaaaaaagtggcagatcatggttgggtcatttgaaagaaccagcctaagagtctgataaaatccgagagcggctatagtaactcccatcaccggcgttgcagctgaggtagctcctttcaacttgaagttgcgagttgtattaagggcaaggaaaatagaatagttgactaagtctacagcatgaattatggagacattgtttctcgctttctttcggatgtttgaccctagttataacccgcaattttagtaatagaatgcaagcgccggtgacatgtccagagtaggtcagggacaatctgagcatggccacatcgtttagtatactttcgttccgccgacggaattcgatatacgtcattcccgcgtacgccgtatcggctttgcaatgacgtgagacatgaggctaatcgctttgtcctcgtccccatggttctagagagtcttgattttccgacgtttctcacctccgtcctctggtgaggcatttttattattcactcaggcacccgagccccgccacttccgtcacctgggcatgcttggcatgcttggcgcgctagtcagcgccctcaggcaaacgacgctagtttcactcggtttacggagaactccggaccccgtttctctttgctcttatgtacctacgagtactacaaaaaccaggcattttgactctttctccgttgtactgacttgcccctgctcaaattctaattggtcgcgtgactatcacatgtctaccctatagacaagcgcgctacgcagcaggtcctcaacatgtagcttctcagctgctgcctcgtctgacccttgaccagaagttacttgttcatgatgccaacacccgcaaggtcccacggcgggcgagtcgtgaccagcgcggctttcattatccgaaaattggaacttattataaatgtaccactgctgaacgcccttggggttgcagtcaaaggcttcgatatgttacagtttttttattcagtacaccgagccaccgtctggtctacattttttattttgtagtccatatcgaatgcaaaagaaacaaagccgagcttgtaacggaccacacaatttggaaagtaaggcgagtactgatatttacgctaacatatgttgtggctgtacggcgtaagcttggcttgcttctaataccgcattgcttgtcaaaggttaaccattttctatcaataactgtaatctgatgacaactaaatcagtccgtgttaccggaaagccctcagaccctcagatggtagtattcagctgtccacggaaattgcatccaaccatgccatgccactatcagaactagtacgcgagatgaaaaggggccggattggtgatcttgcagtccttggcgtggggagaatactgaagccgagacttaagatttttaagcaaaactaaagagttcttacactagttataaaacacggatatatcagccggttggtaacggattggctaggggataacccccagaaacccagaatccttgactaactattccccggaaatcatctgttcaacacagatccataaacccgatcacaacaagccacccacgcaacaccttacggagatgccgagtcggtcccgatgccacttacgacccttctacagcctaatcggaaagccgggtttgacaaaagcatttagccgagattgcagcggtccgtgtgccatgtgccgcggcgcaacggatctggatataattggtcgggaccctgatacataactgggcgagccttgtctagcatacattaaagcacttggcgaaagaagaatttacgtcatgatggggcgaaaagcttgcgacgtcatgttgggtggaacggccttggcgggatcaggtacacggcaatagtaggatgcaaacatgcatagcatggagaacgtgcgaggcagaaccatttgaaattacctgggtgcatttcgccatggtagaaagcgatgaaaaaggcatagcgctattgatgttactgcattagacacaggaatgggccccgcggcatgccgttttcaaaattagtcatccgtgcccagactcgtggacccccgccaagtgcgccaagtgcccccaccaagtgtccccgccaagtgccaagcggaaagattcccccgcgtctctccgcatcgggaacgcgccctcgctggactttcccgtttcggatcggccaaggacgtagtataagtccgattttcaatttaccatatccgttgcagcccccgtggagaagtttgctataagactcccgattccgccgtctcaatatcttttctttccttaccactttttccccaacttttttttatctccgcgcaaacggacggcccttgatttgtctgtaccgccaatatgtggacaaccaccagtggcctgagtggtcgatcgctccgggtgagcatcaccttcgtcgctgtcgtgggtttctcgctcttcggatacaaccagggcatgatggccggtctcctcaacggcgacgagtttgtcaagtcgttcccaatcctcgaaaaacccgacaatgcaactccttccgaaagcttctacgtcgaagtcatccgcggtgctgtcacatcctgctatgagattggatgcttcttcggcgcgttgttctccatgttcttcggtgagagcttcggccgtacccgtgtgatctgtatgggcggcagtgtcctcatcatcggtgcattgataacaacagtctgctttactggtcattgggaggtcggtcagttcgtcatcggccgtgttgtgtcaggtattggaaatggcatgaacacggccacgatcccggtctggcagtcagaatgctccggcgcacacaaccgcggtttccttgtctgcttcgagggtgcaatgattgctggtggtacctttatcgcttactgggtggtcttcggtctttcgcacgccggagacagcgtccagtggcgattccccgtcgcactccagatcttctttgctctggtcgtggttatcggcgccgctatgctcccggattctccgtcgtggtttgtgaacagagggcttgacaacgaggcctgtgtggttcttggcaagcttaagggctcctctccagattccgatttggtgctccacgatttcaatttcctcaaggcggacgtagaatcatcgaaagccgctcaatccggctggaagacagtctttaccttcggcaagacccaggaactccaacgtcttcttattggctgttccggtcaattcttccagcagttcaccggctgcaacgctgctatctactattcaacgctacttttccaagagaatttgggtatggaaaaatatctgtctctaatcatgggcggtgtttttgcttccgtttatgcccttgcgaccatcccctccttctttatgattgaaagagtcggccgtcgtaacctatacttgattggtttcctaggtcagggactcagtttcgttatcacgtttgcttgcttgatcgagcaaaacgagtcgaacgccaagggtgctgccgttggtatcttccttttcatcactttcttcgcatttactatccttcccctgccttggatctaccctccggaaatcaaccccctccgtacccgtactatcggcgcgtcggcctcaacctgcaccaactggatttgcaactttgccgtcgtcatgttcacgccccttttcgctgctcagagcccttggggtgtctatctgttcttcgcactgttcaacttcatcggtctgatcttcggcttcttcttctacgttgaaactgccggtcgtgagcttgaggaggtcgatattatctacgccagagcccatgtagaaggaaagatgccgtggcgggtcgccaatgccatgcccaaactcaacttcgaagagatcgctcaacaatctcgtgagctgggcttgagttccatcgatcatactagagatgagaagagcgagcttggtctcagcagcagtgacaatagacaggaggttgaggaagtcccggagaagcactaattattttgggtgaatgcaatgacgtgccaatgtgtggttgatggtgataatgtttgtgacatggttttttagttcaatttccttttggtctatctcttacgttcggtcggtccccttgacgtcttttgctgtggatatatcaacttctgcccaggtgatgatagaactgattgcagtgcccaggtgtttctggcatgtatatatatccaagacaagaatagattcttttcataattctatctattattctacttcttctacacaccaaggctgatcttcatttccacctgaataggtgagaacccgggcagtacagcaaatcgagttattttattacagtaattcgataaatctcctcttaatatggtccatatatgaaaggacgcgctctcaggccaggcaactagtgaattcgtcttcgacaagaaggctgaccagatctagcccaagaccctgccaattcacctctgttttggtcttcttgaacttcttgacctcgaaaagcaggctgcaatcgcatcgcttttgtcagtacctatccggtaaagtctattggaaggcctcgagcaaattgcgagcattttagatctcgatcgcggtatattcagccggacatactgtgtcaattatcagcatcgcgagatctagtggaaagttacggaatccggtgtgtacgtgtactttcctccttatctgatttcgctggatggcctctgcaagcttcagcacagacagtggattctggcagatttcgcgcagattacgaagcgctctttttatctcagaatcagattggccgggggaatctgaatctgatggcatttcagaccatcgggtgcgaaagtcttgcgtgtctcgcaatctatctttttgccaaaagtgttgcgccgcctgtacaaagatgtcgaggtttgcctcgatgcgcgtaatgcctccttcgatcaactggccgaatagcgctcaacaatgggcatggaccagatacccaggccgttcttctggtagctaataagggtccggtccttctggactgactcgtgctgcgccaagctctcccagtagattcgcagtatactttggcatgaagatatcatccaattgactccatattcgtgcttggtttgggctgcgcggaaaattgtgaactccccaacctccatcgaagacggtgatgcctgtgaggcgatgccgttgatccgcttctactagaactaggctgattcagtcaaatgatcatgccaagtttctctgggatatactcacttccgcggtagagagctttccatatcgggggatgcttatggaaaactgtcttttcgacctcagcggacgggacgagtatatgtttcttcgcacgatcgtcatatgtcttccaccactcttgctcatcctttatttcgcgacgtgacggtccttccccattaatccagacctcgttgatagaagaagcacagggtagacatgatggtaggtgggaccaccattttctgccgaagttccaagtataacttgggtccttgcgctggcccatcccgtcaaaaatcattgctgctgagttttcaaaatgtcagtatagtatttattgcgagctgctcttttgaatagcaagaaaattcacactagaaataacacaagtggtataatagtgggcgctggatataagactggtcgcgtgggggctgctgacccacggcaccggtctacaggttctgaactttgataagcaccaccggcatgtgtgcattcaccacatcctccgtcttccaaatatacaaataatagtataacccatgccaatcatagctaaagtagaatctaagagaaactgaggagatggtttccagtcacgagacgagagtttatggcggaggatatctcgcttcagcatattagcggagtattttgacctccagcatttagagataacattctggtaaagaacatcctgaagactcggaaattcttgggccggcatatcttttctcaatttcatcgtccctaacgaatgaagcaccctagcgctggtctcaacattcgctgtcacctgcataatcgttttaacagccgccaaaactgtcgcgacaaatgtaaaccctcgcattacggtcgctgaactctccattattctctggtttaccttatgaatgtcttcccttcctccatctatgcacccccagtactaacaaacaaccaggaggctctatccacctcatcctcgaaggctactatgccctaaacttcgccacccttccgggctcccagcaactcctcgcgcaactatggaaagaatactccatgtctgattcgcggtatctcacttcgcacgccttcgtcatgtccatggagtccattaccgcctggttctggggcccgttatcattcgtctttgcgtctttcattgtcacggataatccattccggcacccgctgcagattaacatctccaatggacagctgtacggggatgtactgtactactggacctgtgcgtttgactttctggtctacggggttgagtactctaggcccgagggatattacttctatgagtattttgtgctgttgaacgggttttggattgttattccgatttgtaagtaggtttttttcattctgtcgtttcttcagagttggtcagtgaactgttctaatgtttttagtgctcattgcccatagtgtgagagcttgtgggagggcttttgcggaggccaagagggtgagcacggtcggaatgaatgggaatgcgaagataacgtcttgaagaagtttgttcaacgccatatcggaactggttttatatacctaggcagtcccgatgctatttaaacgatgacaaaattacagttggtgagtgctgtggcattgggtctcaattcgccttttcggcaacggtcgtttagcaccgtcctacgatccctacgtaacagcctagggatagctaaagcaggaatgtttataacacgacaacatacaattagaagcaatgatctgaaagctatatttcaaagaacgtatcggaagtttgggttctgttaactggttagtgaaaagatcgcagaaaggaacaatgatatgcagtcactaacctcgaaatcagttagatctgccccagcactctggtcgacagatgactcgatatggcccacagcagaagcggcagcatctcgcagcttgtttctgcgagccagcacaaaccgcagcaaaacggccaaagcagcttgtgcagacgagcatgccaggatgagcttgactccggtctggtatacgggcgcctcctttgccagaaacgcgtggggtccaatgatattgccagcgcagtacgcaaagaaaacgaaggcaatactggttgtacgttttgtataaccacccaggtttgtcgccggcatctgcaaagccagtaccaaagagcagacgtaggcaccgatgatataataaccacacaacacgccgaccttgtatgtctgatggtccagcttccataggagactggcgccgatgacagtcggcatcaagtaaatgaacatgatgacagttcggaagtttttgattcgagatgcgagatatgttcctcctaggacgtaaaagatctggaatcctccaaagggaatacccagcgcgatagcagtggccgagtcattggtcaaccccctgataattagtttgccgaagctcgcgatcccaccatttacgacctcgttcagaagagtgaagaagaacaagatccaaacttgtggatcaatgaaagcttcacggatctgatgccatttgatctggtgattgatgataccggtctggccgagtcgaccgcggccaatgaggagggccttttcgtccaggctgaaacgcttcgatgagataacgtcatccgggaggaagaggagcatcacgactccccagacgagggtaatgccgcccagaatgaggtaaatcgctctccatacagcaatggtgtcgatttgtccaattccatatgtgagaattccacctaccatagctcccagtccgttgcagctgtagaagacaccggcacggaacggttgctgagcacgtgtgtaccacattccgatcatcatcataaagcatggggtgatgggggcttcgaagactcccagaagaaagcggcagatagccattccagtgaaggaggagcaggcggcagtaatcatgagcatggctccccaggcaataatgttcccagagacgactttggcaagctttgtcttctgtgccaggatattccatgggtattcggcgacgagatatgcaaaataaaagatactggcgagccagctgtattggttgcttgacatatgtgtcgaagagagaaggtcgaatacggcagagtaggcgagtgctgatttgtcgatatattgaagcatatacgttccagaaagtaaaggtaacaaaacaagatctactttgcggaccaatgccttgttgcgtggctcgtcatccaggagtgcctggatggcctcttggttgaagccatgttggcggaggaagacctctccttcatcgagatccgttatagtgccaatttgcacatccttctcgtcgatcgtatcgtccacgggtgatttcttgtcgatctccatgctcgccattcaatgagtaatgagtaatagtaaacaaaaagatatcagggagccatatatatccctcgaatccttcggtcataattttccgttatctttggggttttcccccgcacggtataacctagctactttcgaccggggagatagcgatccccacgatgctatacgtatttaccttcggctccaccaagatagcccccacacggtatgacttcggcgctacttttgaatcccggagagatagcgaccacgcccgcggtgctatatcttgctcccgaccccagctcttatctctcgggatttctcttcgttgatttaccactgaaccgtgatacaatcatgactgctgatgccaagtccccctccgtcaccttggcgcaaggccacgtaataggaacccaactcaaagacactttcccccaacccgtcgacgccttcttgggagtcccgtatgccctccctcctgtaggcgatcgacgcttcagaccagcaatcaaagttccgagctcatcagataccattgatgcgtccaagtatggccccgcggctcctggaaaggcacttctctccggaggaccgaagctcgtacagagtgaagactgcttgacggcgaacatctttcgaccggctggcagcaatgatgggcgcaagctccctgtcgcggtctatatccacggcggtgctttcaatcgaggagcggcaactatgcacaatactgcgtccatggtggcgtggtcggaacaccccttcgttgccgtgagctttggttatcgcattggagctcttggattcctgccttcgagtttgtcgcagaaggagggattgctgaatctcggattgcgtgatcagctgcttttattgcaatgggtccaagagaacatcgccaattttggcggtgatcctgccaacgtcactttgtttggtctttctgcgggcgcgcattcagtgaatctcccaattgctgatttctgtaatatttattctgaccaaaatctagattggccaccacctccttaattacgacgagcacaaatcaccattgttccatcgtgtcattatcgagtctggagcaccaacttcccgtgctgttcgcccatataacgccaaggtccacgaggaccagtttacagacttcctccaagaagtcggttgcccacccggtctagccgatgctgaaatctttccattcctacgttcactccccagcctgactgtaacaaatgctcaaacggctgttttcgacaagtacaacccttccctgcggtgggcattccagcccgtgattgacggggacattatccctcgcaagcccctcgaggcatgggagtcaaaagtctggaataaagtacccataatgaccggattcaacagcaacgagggaacaatgtacgtcgacaagaaaatgtcggacgcctcccagttccgcgagttctggcacagtcttctgcccgagctctcgccgtctgatctcgacacaatcgagaagctctatcctgaccccgccgttgatcccacatcaccctatattgaagacagacagggcgagggtctcggacctcaatataaacggattgaagccgcctacggacactatgcgtatgtggcaccggtccgccagacagcacaatttgcgtcatcggaaggtgttcccgtttacctttatcactgggcgctacctaggacggtcgtcggtcgagcaaaccatgccgataatatgtactatgagacctttaacagtgctatcacgggaatttcagaatcccagaaagagctgtctggcacacttcatgcctacttgactagtttcattacaaccggtgatcctaacgccgtgtctggtcgatatggacaaagaccggagtggaagcccttccagccggcggatacacaagttttgatctttggagaggggaatgaggagttgatcggaggtaatgttgctcctcctgcgaaatgtgtcgcagatgattgggcaagagaacagacagaattttggtggtcgaaggttccgatttcccagcttggttgatggatagaacgaacagaatgaattcatgctttctcgtgcgtctttttacatacctgtaaatgtctgtttagaatgaccagccgcgaactatgacgtcgttcatatattttcttctgaactagaaagtctatgaaaactcatgtgcaatattactatacaaaatgcttgtacttcaattcttgggatatttacagcctaattccaaataaaaaaaaggcactaaatggcttatgctggcacgcgtgggccaacacttctccagaactcacagcgctcaccacggccaccttcccacttcgacgcatctgccaggctgaactcattcgtgacgccaggtccttcccgaatccagtaagagaggttatcagtaactttctcgtagaccgttgttccacccgtggtgttcaaattcatcaacacgggagagttgctattccaccttggccaggagatatctccgttcgcactctcaggtacggtagaattgtctgcaccaccctttgcatcgacgatggatattatcggggtgtcattgatgatgaaattgccccaaatcttctggaatgcatggatcaaaccgggagtgggcgtagtcgccccaacagagaagtatgcggacagatctgccccatggtacccaggggtcacagagtattgatatttccagctctccgtggtattttttccagcaaaagcatccgcaagccagtatgaggggcagtcgaaggctgattcggcgtatatgtcgaagactgtctgctgaagaccggttgccatttccgattggttcagagcattctggccatggtcgcctagtgtatcgtatcggggagcagtgtcttggggagagctgtttcggaaaccgtagatatccagcaggcgggaatagtcactgcgggagaacaaagggaaagtagacttgacatagctcaggaagctagcagtggtgttcacaaatggcgggctaagcgggacaccttcattggcattgttctggaggacttagcataaacaaacctacgtgttggtatgatcaatggacttaccccagatagaacgcgcttgccgctcactttcttcgtgtataattgcttggatggaagctcctggatgaaatcgccatctaccacaggcaggaaggcccaggtaccccatgctcctgaaatggagacatttgcactggcgtattgcaaagtatcggtgtcagcattgacaaggcagtcgaatacggctgcctcggatacattgccaccattgtaacaccctgctcgtgcggcaaaatcctgatagtgacctgtcggcactttaccatcgtactggtgcaagtcagtggtataagggctggcggcaataacctatgcaagttagccagactgtctcagatttcatagcgctgtaactttacattattgaataagtggtcctcgcgaccaccataagcaattgattgtagcagcaccgagcctgctccagaagactcgccagcgatcgtgacgcgggaggcattaccgccgaacttttcgatattctcctggacccattcgagggcgaaacgcatatcaagcaggcctgcattggccttgccatacttgtgcactccttccgaggacaaaaagccaaaggcacccagtctgtactgaatcatgactgcaataaacccgttctcgtttgtggcgatccattcactggggtcgtattcggccccgaaaagcccatatccaccaccatctatgaaggcttagaatatgttctttcggtcaaatcttttttattttgacttgtgcgtagacttacgaatccaaaggagaacagggagatctttggctccgggcggagcatacaaattcaagaacaaacagtcctcattgcccagggctgaaccgaagccatacaattctggaagctgtgcagcaccggactgtgggcagagtggaggctgttcagtggcagattgaatggaagtcttgttcactgcaggggactgaggcggttgccatcgcagctttccaacaggaggggctgcatatcgaatccttcagacaataagtaaatataaaaaaacacgctcgttaagcctaatacggtatgttcttaccccttgaagacattgaggtcgtaggtgttgtcatagtaaccctggtaggtggcgtagtctaaatcaaccactgggctcgaggtttgaaccggagtagccaaaccagccggggcagtggtgagagccaaaaaaacaaggctgcttattccggcagcgaaacccatatctgaatctccaccgttggaatcggatgattggagaggaaaagagacgggacgggtggtatttttatgagacgatagtgattggtgaatacgagcttcttatgtacacctgcaggactgacagccctaagcgacctcgggagtccacgggccatgtaacattcctgagagcgagcggatcagcccgaatgtcccgttgtttattgactccactatttaaaggggtatataatatactatgcgtgtcctgaatggttgtgttgttagtgtcgagcttagcatatcatccaggccgctactaagcgattgcaaacactctgattgctccatccgtatccacaagcaatatacaatgttcaaatgtgcagaacacgggagcagcaatggggcaatgggggccaaaataaggagtaacccctaagtaatagacgtaaactaatatatcgctcaacggtcggagtttttttagaatccttcactctccccgtaatggcggaggaagtcgatttgagcgcgtcgcgggtcaccaccgtgactatatgctattcggttcccattccattcatgattttgtttactgggctccggcttttcgtggtactgcgaccttcatccaaagatccgttgagctttgatgattatatgattactttttccacggtctgaaccaacttttccttccggatcttgctgttcttgggatatccaattttctaatactgctgtaggcaatatccattggactctgtataagtggcttggtgtatggtaggttcttatgccaagatatatattggattcttgcaagggtaaggctgacccagattgaactttattatgtataggtccaccctacggctttgggagacatcaagcgacgctcagtacccatgaagtccaaggtttcttgcgggtgatttcaacagattcattatatcaatttacatactgaacattccgaatagggcgactatatcttcagccatttctacgattgggccattgcaagcattaagctttcaattcttgggctttactatcgcatttttagcacggtcgtttttcggcgagttatcattggaaccgcagtctttattttttgctggctcgcagcgatggagatcggcctagggctacagtgtatccccattgagagaagttgggattcggatgttaaggggacctgtataaatctggtggccttctcctacttcaccaacatcacgaacctggtcagcgacatatgggtctttcttcttcccctaccgattatcttcggactgcacgttaatcgaaagcgaaaattggagatcgctggtgtttttgccattggtctattgtaagttatgctctacgtcgactggaattcttctgacctgtttagcacctgcggcgttactcttgctcgcttaaccgttgtggtctcacaagggtcgtcggacttcacttgtacgtcaaaaaatatccgattcagtatccacagcgctaataacaggattaggggctggtgttccgctcggaatcctgtctatatacgaagtactttgtggaatcgcctgcgcgaatctcccctttctttacaaactagcaatcgggcctttcaagaagtctgcctcttaccactcacgtatcggagagtcagagtccggagcagagtatagagctaggcaaaatagctcacggaggcatacaaaaacactgagtatgcacagtgaagggaggatgctctcacggaatgggaatgattcgacaacattgattgagacacgatccaatcaaaatcccgagatagaactctcaatagtggaacgatcgtattccatgtctcgatcagatagccaagaaatattacggaaataaccatcaattgataaatgcacccaaaatgttggaaacaggcgaaatttattttagattcgatgagaggggaaaaaagtataaaaaaagatattcgacagcacagggatttgaaccctggatctcgaaagaactagatttctcaaattaggattcaagtctagcgccttaaccactcggccatactgtcggaacttattgtgaaaacccgtccgacttgttcctttaaccaaacatgtgcctactagtattttgaagtaatattttccgtattattttcagtattttatccaagtcaatggtattttctcaacatatcaccttcatctcggtgctttccaataagatcgaatcgttatttgtccataaaaaatgttctttctgattcttacattgatctccttttcttatttacaaatattaacctcgttcaactttgccaaaattggcttttttaagctttcttgtcatccatggatagagtgtgggtctttgttgtcttgctgccctcgtctgcgaccccacacatttcctttctttgtacaaacaatactctgtacctccgtgctgcgtgtctcaactgcgtctttctggccctgccgtctcgtcaatattttgtccaatacgtgcctggttaggtatctcgggacctagaaattccgtgccgatcacggggttccgaatcaacacagcaccaacttcgagttgcaacctccaaaccttaagccatgtcaactgcaactagacgaggagtgttttcttccgctatttcaggctacacccgattcattttgcgcgcccggattttgaattcccccagaatgcaccgatcttggtccgcaaatccacgggtttcttttaccacctcaattcaaggtcaggtatggtctccacgggttttcagtctggtaagcctagcttatgctgaatgagattatctattcagaccagagttgggacaagccggatttccacctttataccgccggtcgctggctgttcaacgagactcaacagctagctgaaagacgagtgaacttcaattttgatgaactcgtgagagttgccatggagagcctggatttcggcccccatgtctgcacggaagtggaaaagctccccgacggaaactacagcaaagcattccttctcaccacggaaagcggacatcaactcgtagccaaggttccaaatccgaatgctggtccccttttacacaactgcgagtgaagtcgccaccatggaatttataagttcaatgaccccattgttatggtccttcataataactctgggcaggcaagtaccatcgcaggaattccagtgcccaaagttcatgcctggaataatagcgcagaggataatgctgtcggtgctgagtatattatcatggagaaggcaaatggtgtcttattaagctcacagtgggcaacaatgagcaccgaccagaagcgggagttgatccaaagtatcattgactttgaacgctcccttattgctcattcttttgacatgattggtagcatttactatgaaaatgatctagcgaactccaaagatggatgtttgtcaacttcattccctagatttgcgatcgggccgatagcggatcgcaggttcctggaagatggacgaagtgcgatcgagtcttataaaggaccatgtgcgtttttctacctcttgaccaccaatgcctttgtctgacgtgggttcagctagggaatacaatgattgactatgtccattcgatggcgagtcgcgaagaagattgtagcaaacatcttagccgattccccagaccagaggggatttttggcgcgcccgggtcatatcagcctacggctcaagcaaaactcgatgttatctctgatttccgcaaaattgcatcctttatagttccgaaggacgcgaccgtgacaaagcctgttctctggcataccgacttccatgcggataatatctttgtggatccaaataatccttccaagatttttgctgtcattgactggcaaagcgtacatgtcgctccattgtgccaacaagtgattacacccgcattcctgaatttcaattggccaaagccagatgaaggtctttgtcttccttctcttccagacaatttccagacattgagcgccgaagagaaagccaaagccaaagtcttacgaactcaacaattattatacaaactttatgaaattcaatctggacgacagaataaggatgttttcagagcgcttcagtatcccaacgtacttggatcccagattatttcactcgtatcccaggttttgaacgacggtgaaacaattatcaagggccaattgtttcaacttgttgaacagtggagaacaacagttggcgcagatggaacaccgtgcctgatcacctttactgatgatgatatcgtgcagcaaaatttagatcaagagaagtgggaagaaggtgtgcagctcatggaagatgttctggaagctcttggcggtgcagagaatggttggcaaggctgggtaagtcatgatgagtatgcgcaggcgaaggtcaaattggagatggtgaaggaacagttcttggatcatatggcccataatccagcggagagagaagcacggtgctgggcatggccgtttcaaggtcaagatactcacactgaacatgattggctaagagaggagacaagcaataaccacttgagactttgataaatgccaaggatggcccccaagttgacttcaatataggaaaagtgctcaaaccagctcactccaaatggaatcaaaagcgtttattatattgcacaattacgctcttattcactccatgttaaagctacagaatttaaaaatgcggtctctttgttttcctgctttctttcatcgcctttccacctctactacctttcttcttgaacgcgtctttacattcggattattccaattttttgtgcgccagtagtgtgcttcccaactactatggccgacgtgagggattctgttgaaggaaacgtctctggagacgaggaagacgtggacaagcaaggacttcgggccacagaacacgatctggagcaagccaattccaaggctgtctttaactcgaagaaagcactgtggggattcttggtgctatgctattcggtacgcggggactgatgcttactttggattgacatctgcttgagcgagatgacatgctgataatgcattcgcccaattccagactggcccaacatcttccatggtttcgaattatgtgactgcggccatcctctcggcagccaatctcctgggccaccaggccggatctaacaagccatgctcacgccgtggaacaaacatcagttgtctagtggaattcggtggaggggagatcgactataacagctatacgtgcgtatcgtggcattgaggtgcggggtgactttgctgacgagaagaaagattgtaccttcgagcaatcagtcgcgccatggaaggcatagtatcgattctcacggccggcttagcagactatgccagtgagtagaacgaattgacacctttggatttttagcgctgatccagatacctccagactaccgcaagacgatgatgatgacctcgatatttctgttcggggcattagccttgccttttgcaggactcacgggtcagagttatagccatctgaccgccttgtctgtgctatattgcttcttaacgacggtcggaggtgtctatactgtgatcgaggggtcatacattccgatctttatgagatcgacgggctggttccgtgactcccttgtagcggcaagccaggacgagagagcgacgtggaacaaaggagtctctattagtgttctggctttggtttcgggcaatgtcggtggcttgactgccctgatcatcggtgtcattcttgtgtatgggcgggggtcttatgtgcaggttgggtacttcaactacgttctagccatcacaattgcgggctgcatcacaagtaggttgtacttagttctagatcatgaatccccgatagctgactttcccagtcctgtttgcattccttggccagtaccttctcccatcagtgcccggcaaaaagctcgaccgcacgaaaaacaaattccctctgctgatcgccttcaaaaactggctgaaactgctgaaaagcgtaacgcactattcggaagcattcaaattctgcatcggttgggttctatggaacaccggctattccaaccacctgcagctcatcggcgcgctcttcctccaggtcactggattttcccgcagttccggggtatactcggtctggtcctttaccagcgtgatctttgcctgcacaggcagcttgagcttcatgtatctccaccggcgacttcggctccccgtgaaatcatacgcatatgccttcctcgtggtgaatatcctatgtgtgctgtggggctgcatcggaatcagcaaccatgttacaattggttataagcaccaggtcgagttctgggttgagcaggtcctgttcatgtcgactagtagtgcgcttcgggcgtataaccgtgcaatctactcttccatgattccggagaactcggaagcgcagtttttcggtctggagatcactttggatctcgcgactgggtgggtcaatcctctggtaatgggtattatccaggatcggacgcataatttgcgctttccgatgattccgaacttgtttctgatgcttgttggacttggtctttactcgcaggtggatattggcaaggggatccagcaggcaaaggtaccgttggtacagtaggttgacagagagactggagttgggaggtttgatcatcgttggatagaaaacaggaaaaggcgatcgttcttgcggtcggatacaccgccgatctgtggtgaaggcgtcgcttatgctgaaagctttggtgtcttgtcggggcttttcttgtattgcctggttctcaatatatatttgtcgtgaccaacagtatgaatgacccctggatttcttttccgaccacaaataaccgcagctttagatactcctgttttaattagttcttcgtcgtcgcttgtgttgttatttacggtagaaagtccttttagactgccgacaagtatcacatcgcatactaaagacatatagttgctacatggaaattgaaaagactacggtatattctcttcaagtgatcagttatcataagcagcactaatggtgtagtggtaacatataacacttccaagtaatcatccgactactaagttatgttgtgccgggggttcgattccctcttagtgcattttttgatatttttttctttttcatcgtgacatgagttagaattctattgtctctctctgtacaacgaaagagaagagttaatggattaatgttctgatctcaataactatacattctgcacaatgagttcacatgtaaccagccctatgaaccacctccaccacgtaaaacaatcatctacaccaggtccaagaccaaatagataagtgatctttagttgttacacgtgtatatatacagactatgaagtacagcgcacataaagttgacaatgacattccatatacccataaagcaaaaaataaatcgaacaaaaaccaatgcaagaccacccccatgttcgccgcgaaacgccgtgccatgatgtattggggacaaaaaatcgcgcatcaactgtagggggtactcgcgagaaggggaatcagtcgaagaagatagacaaatgagatgcgagagatgacaaaagagacaaaaaaaaaatacgacaaatgagatggcagacaaaagaaaccctcaaccagcccagctcccattttgtccagcagagtagagacaagctaatccgagaaagctgtcatgagatgggatatgatagatgcggttgaagcaaaatcagaaaacaatgcggatgggatattcgggcacataaacataggaacaaaggaaacaaaaagggaaacaacaccgggaaatgagatcgtgtactttttcatgtccagcatctgggaaacaaaataaaacgagacgtgggaaaggagattcaaccaaggaaatgaattgtccatggggttattttctcggtgctcgcaccggaaatgaccaaatggcgcaatgattagtccctgtagaccctgctacagaggattcgagtatgattatacagtacaaggaggaactccagcctccgattggtatcagtatcaggttgtagatgggatgggagcagtgccagtattagccgttgaccatgtcatccagggccatcttgcgccgtttgatcggtctgttgtcgtgaccttcagcttccatgctgggcggttcggccctcgtcagagaaggcgagtggccagatgctatctggatcggggatggcagttccactgggccaaggtggcggggtatgggatccatagttgcgcttgttatggaggaggagcgttggtgggggagagggtagttgaagaccgggcctgcagatctgtggagaggtagagcgcgggggtcgtaaaggggttcttcccggcctgggagagtccaattcattgggtacgggtcgctcaggcgatggacatggtgaggagggggtggcccagctgtggcttggtggattggggggagccggactggagattcgacggtatatggatcccgaggtgatagtgatacccgtgaatcatttgccgttgggcggataggattgccaggcgtctcagtatacggtagaaagggcataccgactggtggtggctgatgttgaggaggtgatgttggtggtggtaatgctgggacaccgtatgtttggaatcgtcgatccatgccaccggacatagtgttgacttttaagaccggattcaaccctgccattggcatgtacggcgaaggtacatgtgagtgcgtcggtaccgaataagatggcggtccagatgaagagaatgggcgtcgaatcatacccgggacattgggcgagaggtccataggccgcgtgagaggaaataccgaagcggaccaccggtgtggtgtccgtattcccgagctgacatctcccaatccctgtagatccgtcatgggacgcagttctcgtgaagaagtggcccgatgcatagcggtccgccgcgggggcatagttggctgagcctccgctgggacagccgggttatccaagtgcgtggtgtatgacttgacagatgaatcctctgcttttaatgggggccgtcctcgctttttgtgcgtgacgtccacacatgttgactttcctgctcgttagttacaattccactattcatgagaattcattaacacttacagcctttccagcaagcacacatcttcgacatggacgggctgggtcacatccaagatgctttttcttgcaattgacacaagctgatgccacatgggcctttgtacgtcgggttgatttctgtgctagtgatcggcctgtgggatgcgttgggtccaatgttggtgctcctgctagcaatggagatccagcatacaccggtccctgttcgttatatccccgtgacagtggctcattaaccggtatttgcgatagctccaataccggcacagcagaccgctccgtgaatccgagagagggaggatatccccgagggatctctgcggatagctccgagggctttgctggaggagatccagacatagattggtggggtatcggagcccgggggctgcaccctcgagcattgggggtccaagatcgattcaacggcagccgctctgggccctggttgaatcggggctgtccgaattgggatatagtgaggctcggggggtgaagcacgagtgagtgcatcggatgtcaagcaggaaagggaaagggcccacggggcaaatgcttctttcggcctttttttgttttttccttttttttttcgttctcggtcttgctggattccgaagtatatcttggttcaatttcacaagcagagaccgctgaattgcgcggttttttgagacagcatgtctgagtaatagatctgggagtaactagcgacacagaaagcgcggtgtagggagaatagaaaagagccagaggtcatcaaagttcttccaatgccgtccgaggacccaagcttataatcaaggtggatcgatccgctattggaggagtcagaaaatagactgcatcgatggggagatttctagatgacagcagggcacagggttactcatacgcatgtcttccctagggcgacttattgcaggatggcggtcgatcattgagctaggatcaaggtgcagtaaaatgtcaaagtccccaccccacgccttacctcttgatcacacgttccacgttcctcgagggtatttttgtgtaaaggggagaaaacggtgaagtatatgaccgaaagtggtgcgaggtcgcccaaagtaggggaataaaaagtacacccccacttgaatgttcccaaggcgttcgatagtccaaacgaaccgctgaactatcacacaataagcagtgtaggaaagagtagtggtccatgcaggcgctagtagctgatagatttgatcttcgtcatggtagatcattggagaataatgggtttaacgggtgcccctccttagactcctttctttggaggcctggtattagatacattcgatactgaaaaaagagaataaagaatatattgcctcctctccctcctcccccctcccccctnnnnnnnnnnnnnnnnnnnnnnnnnnnnnnnnnnnnnnnnnnnnnnnnnnnnnnnnnnnnnnnnnnnnnnnnnnnnnnnnnnnnnnnnnnnnnnnnnnnnnnnnnnnnnnnnnnnnnnnnnnnnnnnnnnnnnnnnnnnnnnnnnnnnnnnnnnnnnnnnnnnnnnnnnnnnnnnnnnnnnnnnnnnnnnnnnnnnnnnnnnnnnnnnnnnnnnnnnnnnnnnnnnnnnnnnnnnnnnnnnnnnnnnnnnnnnnnnnnnccccctccccctctcctatctaggacatcgagggcgtgcatttgacagaacgctgtcagtgccacccccccgagcgggtaaagggaagggattgaatgccactagtcaacggatagttcttttcccttttctttttctcgttttttccatttttccgttcggagaggggtgacagtgtataccaatcagggctaagcaaggtggaagattgacggatcgacgtcggtgcccgcagccattgccaatagtcgacctcggcgtggactatgcgcattccgagtacgggaggacatgtactccgtattttacgcatttaattctattctagattggatctaagatagcaggagagtcggataggaggatagtaacctcattgaattgtcgctggtggtcttagggttgcaatcgggaggtcaccttgaccttcacgtctcctttgggcaattataaggtcaatcggagttctttcgccttagactttgtgtcttgaatatttaatttccattgaaatgtcctattccttcttccccagcgaattaatcgccctaaatctagccaatctgaatatttcgactccacaacatcgcccggcagttcgatgatctcccacttaaaccctttaaatgctcctaaaacccttgaacccttttaaacattgagaaatccccttattctccgatccacccgggtaaatcattgtatgaccgagtcgatccttttatgctccgtctaggggttactgttacaatcgcagatcagagatggaaaggtctcacagggttttgaccgtggtcgagtcggacaagtgcaggcaccgtaaatgtccccttttttctcctttttctcctttttctttttggggattttctggaaataggttgcgggtgtgataccgagtctcgcaataatcagtttcctgtgatacccacacttggggggcgtttttctcgcttttttttctctgcgcttagactcggactttgtattggaaccggtggagtgatattgaggaaagagaagaagcagagggtcctgaacggtcttaaatggtcccaagggctccaaggagaatatctggaaaaggactcggtgtctttatttttccggggaccccaacagcgatgtggctgcagccgggcgatcacattcgatcacattgtcctttgcctctgctctgcgcgtgcgcatgccgatcaccatccctggctttggaactgcaggattccttggatctcacgtcatggggagggagtgtgtggtatatccagagcctaatagctgatctcctcctattcgttgtatcgatataaccactctatggtgttataatatagcatagagtggtgtgatcatatcactagttcatgtatatataaactcggcaggatccgatcaagggaaaaggggtgtggaacatgcggcacgcggagcagcaaggggtctgtcaccccgttcatgcaggatattaaatagtctagacaattatacggttggttgctttgtgaatcttttccactgccaatcataagcctattcgtctgttatttgtgcagtttatactaactccgacctctcgcggtatagtgttgtagccgccgacgtgcccaaagtccagaccagactatgttatagtccagactctattaatttgacgagtggagctcatcactagcactatttaattcttttaatctaaattcctgatcagatcaaaaatcgccgaatcattggtttttagcgttaaatagttccggttagtacggagattattcggaacttgggagaattctcctagtgcaacgtctaaaacttgagacaatgtctatagtttctatagttccatatacttaattaacttgacgtgccgccaatccagatctgggcatcgatggacatcctctaacctcttaacggtgaccaaagcgtgtgattgggctgatatcacatcttcctccatcacggcccatattgatctacagtttaaacgtgatggcctggcccagtgccaatgttgagtcagtcacatttccaatcggtctccggatactccgttggagtctaggctacacagcttcttccatgtgctgagctgggcggttcctaaatctcggattcatactttggacatcggaataaaatctccgaaacacaaattgtggtatctctgcaatatagacatctattctacagtaaactttttcctccgtaatcccctagcgtctcttcgacggccgggcattcttatcgcgacgctgttgcacctgcttccgcgccttgcgaatatcctccgtagaccgaagttcgctctttccgccgtatgccgctccaccaagcttatcgtgctggcgttcgcgcgccgcgtcgttcttcttcttcatcttgtcgtagtcgccacgcagaggatcggcccgcttaggcgcccggtcctggctgtgtcggaatcggccactgctcatgcgcgagttgacgttgttcatattaggcgtctcggcctcgccaacacgaggcatccgatcaacgcgcttgcccttcttccaggcctggaagcgaccgctgcggaaactggcggcgatcttggctccactctcgccgcgcacgagtcggctgcccttggaaccgtcctcgtcgttctggcgggcaacgtacttcttgtgtcgcttgtcccagcgcatgatggaacgcgcttcgccgaacccgcgcttgccttcgtcgccgttgaggtccatagtcgcgttgcgggagtcgctggcaaagttcgagttggtacccgagtgcacaccgtaagccttatcttcggccatgtcgttgtgctgaggtgtgtagcccatgaaataatccgggttctggaatgctgctgctgcgtcttttttctcgccttgcttggacttggagttgtacgcagagaaagtgacttcgaggtcatcgtcggatgcgtctgacatgttctcgccggcatgctcggggatgtcctcgtcctccacttgaccatccgggccgggagtgggcattccaagcgctgccaactcggcctctgctttggcatccgctcgctttctcttgttctcgacactagtgcggagtcggcgaatggtgtcaacggcctcgttgtcagccactttgccgcctcgtcggttgttcgcctcgaaaatcgtttcatgtgggcggtaaccaccaatgcgggccagcatactctctcgctctacttccctctcagtggttgcatcattgaagagcgggtgaatctcagcccagtgatcagaagacacaacatccttggcccgtttggcactctcggcagaagccgagttgcgggtgcgcagatatagcttctctcccttttgagacactcccttttgtccgtaaatatctatatcatcgtcgagcaccttctgtacccattcgcaagtgcgagagattgcctctctcggcagcgttcccacgacaacatcctctgcaaagttgacttcagtgccatactgacgaccgaggaccaacctgcgtcccaagaacagctgaagatccagaagatacggggcatctttgtcgcgaacaagactgtaactccaacccttttggcctgcacgagccgtacgaccgacacggtgaatgaagatcttgggctgtgaggggaaatcgtagttgatgacgttggcaagaacaggaatatcaatacctctggcggccacatcggtgacgactaggatatttgagattccggatcggaagttttgaacatggtgattacgagcagtctgatccagggaaccgtaggcgtaagaggtggcaaaccctgcctcggtgagaagagagtagaggtagtcgacgtgatgcttggttgcagcgaacacaatagttgagtgctcggtaggtgactccttgaagccgctcgggagacggacatccgatctcttgcgcttccttgtcgggttctcggcttcttggcgtaatctcccgccaatatatgtctcaccggtaggcatcttgataatgttatgcaaaatatgtagtagggcaccttctttatctgccgacttcacagcaaagaaggcattttgtagatccggagaaactttgttctcgatgtccagacgaattagacttggctcttggagaccagcacgagcaaattcgacaagcgacttgggcaatgtagcggaaaagagaagagtctggcggttcgtgggcaggccgtgcaaaatctcggtcaactgtgcggcgaaacccatttcgaacagtctgtcggcttcatcgaagacaacatacttgatgctagaaagatccatgtccatttcgaccttcaagtgcaggaatcgaccgggtgttgcgatgatgatatcggggttgttggccatcatgccgaactgatcttccagactgtcaccaccaatgagaagcaccgatgtcaaatttgttcccttgcccatctccttaacgaccttcatggtttgtagagccaattcacgggatggggacatgataagagcacgtgcaccgaacgaggtgctatggctcttcaacttctcaatcataggaataacaaacgaggcagtctttccggaaccagttcgagccataccaaccacatccttgtcgtccatgatcatgggaatagtctttcgctgaatcggggtaggcacggaaaatcctttgcgggtgatcgctttcagcagactcatgctgagacccattgcctggaaaccaccacccttcttcaccgtacggcccttgagatttgcgccctttcggttggcggacgcctgcgagttcgcaatgaaagccgcatcgccgtcgtcttcgtttaaaaagtcaagatcttggtgggtatcgggcttctggggctttttcttggggggtggctttgcgccgtcatcggaatcgctgtcatgttcaaaaagggattttgtgatgtcgaactcgacctccgattctgcgggtgaggcagcacggggagccattgttgcggtatgctgtgaagtctcgactgatatggaaatgcagtgataagcgttagaccgtttggctcttcaatggccggggaatatgaaacacagaaagattggcagtgattaattaatgtatcacgcgaacaaatcctcgactactcaaacttcagacacctgaagaaaagtcgagtcgcttatctcgctgtctttctgtcgcaaaaaaaaagttgagagaatcgtaggcggtgaataccggatcaaccatcgcccgcgtgcaaactaaacaaacagaatttatacaatttgcgctgaatgtggtcatagaaacattgtctatttggagtttcaaagatttacagagacaagactgtactatacatctaatatgtacctaatatgtacctgcattgtggttcgaaatctccagcagctactcgatgtgcagcccagctggatgaagacacattggacagtccttttgaaatttcaagatagtaatcatcaaaagatagcattttaagagtaatcaatcactacaaaagtcaatatagcatctataatgtcgaagttcagagcagacgattttaagtagatccaattcgagaggcggtctgaaatggcaaaacacgatccccgcgacgcgtgcgacacgctcccaattaagtaaaatggtgttgaagaaacagctgtaccttgacctttccccttcacaatctcacatacaccatgggtatgtaccactctaaatctaagctattactctagccatatctaataatattgtcagacggcagttacaacaattatagctcctcattcggcgggggtggaggattcatgccgggcgaggcgaacagtcccgcgggaggcaaggtatacacatgatccaggcctgtctttacaacaccaactgatatccaacgcagaccggtgaccgagacaacaaaacccttcgacccgtgacagcgaaacaagtcctcgatgcctcgcagcccttccccgaagccccatttcaaatcgacggcgccgacgtcgccaatgtcctcctcatgggccaaatacgcaacatcagctcgcagagcacaaacgtcacgtacaagattgacgacggcacgggcgaggtcgaggtcaagaaatgggtcgactcagccaccgcagactccatggacaccgacgatggcaaggcgcccgccgatgggaagaccgaggtcgagctcaacggtcacgcacgggtctttggttccatcaagtcctttggtaacaagcggtacattggtgctcattctgttcggcctttgacggatatcaatgagctgcatacccatctgctcgaggccacggctgtgcatttgttcttcactcgcggcccgcctggtggtggtggtggtgctgctgctggcaatgctggcggtgttgatgctgttatgggtggtgcggatgattacggtgctgggcagaataaggctcttgcttcgatgtcgcttgttgcgaagaagatttataacctgctcaagacggagcctcaggatgatacgggcctacatatgcaggtcattgcttctaaattgaacatgcctgcgtctgaagtgggtagggctggcgaggagttgcttggggctggtgtgatcttttctactatggacgagcagacgtgggctattctggaatactagagatgagtggttgtgtctttaaacgtcacattcagactccaatgatattatgatttgtcttgtataacacttgatagagtcgaaacatgtagcaaaattgacaacaggcttgggtcaaaacaagattggaacataaatcacttgaagccgctaatgcaaaacgagatataaagaacatatgctggaagatttgaccattttcgtcatgaactgcatatcaagtcgtgtgcatgcttctcatataccaagggtcaagttaggtcaactcattcctcttgatagcttcctcgaccgagcgattccaattagctcgactgataaaggtggcctcgatgagcgaaacaaggcccaatgcaagcgcaactccagtccacaagcccataacaccccaacccaaagcaaaggttgttcccatactaagcggcatggcaatcacatagtaacagaagagttggatatagccgcccacctcctggcgacccagaccacggagaataccgttgcagtttgccgagagagcgtcgaaaagctggaaggctgcgcagagcggaagcacctgcgctacaatttcgacgacttcgggatcggagctgaacaacctagggatataggaccgcaaagtcgagagaaggaccatgttgaacacgccaacgatggctgctccgaagaagctcactttcgcagaggtctttgcggcatcgaccaaggtagccccgatcagatttgctatccgcgtgctacctgcaatagatagggggaacggaatctgccatgtaatgctggagattgttgctaggatggactgcgctgcgagtgcggatgtgccgaggtagcttgatgccagcgtcaaaatttcaaatgccaggcactctgcctcgaccatgatcagccctgggagggcgagacggatcattgggccccagttctggaatgctcgtctggtgaatccgcaccaacactcggatcccacgaagaaataaacatagatgaacaggcaaagcgggaggagattttcggttattacgacggcgattggcgccccaatgaagccccattgaagtttcttttatacaagtcagtattgtcctcgtaaaaggctggaaagtacctacccagacgaagaaccagttcatgaacgcattcagtggcgcgcagaaaatgaggacatatagggaggcagaaaacacaccctgggcctggagatatcgcttgccactctcgaaaagagcgaatcccggggtgcccaagagagcaaccttcaaatacagacccgccatctgggcgacctccttctctggcacgatcttggcaaggatatgctcagagaaataccagagaaacatgatcggaatggtgataacccaaaggaaatacaccatacgcagcatctgcaggcccaccaactttctctttccagagccgtaggcctgcgcacagagggtatccaaactagttgacagacccgagtacaccgcatttccagtaattgtcacagtcatactcgccagactgacagctccaagctcttcctttcccagatggccaatggtaaagatactagccacagtcaaagaatactgcagtaagaaagtgaccatgagcggcaaagagtatttcataatgacctttgcttcgcgctgccatgtcgtctggatcaaaccggctgcgacggcctctccccatttccgatcaatctcttccgagtccaatccactgtcctcggcatcggaagtccgctctctaagtagagcagtgatttcgcttgccgcgtccgactcatgatcactgcttctcgagcgtcgagaagctccacttggccgtcgagaccgggatccttggccgataatattgttgtcactcagtagctgccgttcctctccgatgacttgatcgcgctcgctttgggaaatggcttgctgttccccagcccatgggaccacagtcgcatggctgacagatgtcacataactcgggcggcgatatgaaccggctaaagagcgggggttggtgctggtatagctgtcgatccggcgggctgttgaagtgtcggaatcttcatcggtgggtgttcgatcctcctcgctgtagtctgcgaggtctcgggcaattgctgaggcggcaatgggcgagctggatgtgaaggaacgaccaaatgggctttgatactcggcggaatccaccgagcggatgttgcgggccatgataagatgtgagagacgagtctatgggtgttttacggccaccgcattatttacagccagataattgagctatctcggggtgagactctagatccttggagctttggagatatcgaaggcaaaaagcctgcagagaaaaagacggcctaaagctggatgcggagatgtatttgtaataccagcaatacgaccggtccaggtgcagacactctgtatatcgtgtaatttaccgaaacagcccccgagtgataatgcagataacacttcagtaagggatgtgagtcaaccaccggagcgtgtgattggctgtcactatcacatacaaggttcttctttactaaatccagtgcccgaagacgacgctaaatcataatcgcttcttcctaaaccccgctaacacttagtgggaagctcgatgcgggcagtgtcgccgtgatctcacttgatatggccacccccactatgttgtaccggacatgaactcacggcctagcggtaaaggcatcgttagtaaggatatgatctcggccacttcaacaatcgcgtcgctatgtatataaccgaggtgatattaccataaagaacgagcatagatctgcatacaagaacctgatcacgatcgtcctagtaatgtgtgaacgctggggctgtcgatcctcagacctgatcgtacatccatactccatactccgtacagcatactccgtacaacataacagatgagcaatcagaaacgactgtgacatcattcccaaaacagtataggctatcacatgaccggcctttgaccccgtccccgggttttctccagacttcggggatgaccgagcgtgtatcaaccctctcaccatgtcactaatggtgacacaagtaggggttggtcgtgctcgcttcaaccctttggtcaacccggtaaattcgaagccggtcctcgtggaagagtaagtcctaaactgtccaagcaatcgccgaacgagcgcgaaatggctggagagcagaacaatggcttggtcccttacatgacgctgtacttcaaaattaaagcctggcatgcgccatgaaagccatgattgccatgatttacacacgccccacgccacattctgccgcagtgacaggccagcccggttgacaattttaaagacacatcgagtcccagcaccacatcttcctctcacgcccttacctcggcgcgctcttattcgaaaacagctcttccgatgcccgcgaccactgcgccaacgagcgcactttcctttcatggctccgtctgtcgatgtatctggcgatcgtgtcgatggccatcatcatctccttccatttccgcgatcaacccaccggcctagagagacgcatggccttaccgctcgggatcatcttttggattctgagcttgacctgtttggctaatgggtttgcgaattactcgcgtacggtcaggaagtacgcgcgcaaggcggctttggtgcagagtggttggaaaacgcaggttgtctttacggtcgttgggacggtcattctgggcagttgcatcttgtttttgtccacagatccagcgcggtaatggtcgttctggggtcggatttgtcgatttattccattagcgctggcgttggtattcttgggcattttggttgctttctacattcgttattgtattattgtatttaatgtccagatcaggtctcagagactacttggtaatattcaaagaaaactcgaaaaatctcagaaccaagcgttgaatatattgtaattttctcctaaaataaacagagaggccaaagatcagattatgatgtcgcgagaagcgtcttgtgtgcagaggtatatttccatgaatctcgtaaaggaggctgggtttgctccagggaatgcaaatgacaaaagaaacagcgcatagaccgaaatggaaccaaattatacgataaactatacgtcgggacatttacatccgacggatttcccgctcattcttgtacttctccagggctggtgtaccgaggtggctccaccactcgaagagcatggagttgcagataagcttgaaccagggggtaaatgtcaaaccgggctgctcgaacattgccttaagctcatcagctgagacgtaggtggtgtctcggacctcgttggggctgggatccagatcgacatcggcctggatgaagaggatatagtccactagcaaaatgtcagtatttccatcgaatcagatctatattgcatgtaacataccctcgtgctcaccccactttccatcgctgggggccttgtagtgaattcgggtgaagaattcaaatttgtccaggggtacttgctctgccttaatgcccagttcgtggtccagcttgcgctgcgcagcacgcttcacacccagtacggcagcatcgagctcagctccagtctcgccgggaatgccaagggggtgtgagcagcaagtgttggtccacatatcagggaaggtgatcttctcggtggcgcgctgttggagcagaagacgcttattggagtcgaaaaggaaaactgaaaaggcacgatgaaggagacccttgtcgatgttggtcattaaatggcctatgcaaatgcaactgtcagtgtttttatcttgccatgttgtgtccactaccccgccattctgtacatctgtgggtgattataggatgcgaaacatacaaatcttcttgctggcgcttccaatcggccggtcattgttatccaaaacaatgcagacctcgtccatcaggcggacctgctcttcatcgtatccctctagttcgctgccgcgcgcagtgtttgtttggcttatcgggaggacctcacgggcgagcgatgtatcgacctcgggaaagagagtggcgacattgtccgccgtgatctcaggcgggcttgtgattgtcatggttgcgctcattttgactgaaaactaaggctgaaaagcaaagctgaaagaaagaatgagaatcccaaagaaagaattcggaggaaatgcggtcttgggtcaaaggcggcaatgatcggcaaatttgcctcggattccatccgcaaggttgttggccgggggaacttgggattgggaatctccagacaacattctaccaaggacaatctatggcttacaaaaagtgactatataaagatcagaaatttcattcaaggctagatctatctgtgtgcgaaggccaaaagcatcaattcacaccaagccatcatgggcatcaagatagccttgatcacttcagttcaaggagactagtcaacttctccaattctgcaacttcctctggccccaaaaggcccaacttctcccgccgagttggcgcattcgggtcaaacacaggcttctcagcgagcgaagtcacccgtgttccgtgtctaggctgggatccctcataatcccagcttgcgttatggatcgtgatgctattgaaaataagcttcaaatccaagacctttcagagtattgactaaccggttatcccacaatgcactcgtgcgtggactccatttaaaccgaacctggatatcagggttcttctcataaacgtcgtataggtatcccagaatcacatcactttcggccttgtcaagcccaacgattcggtctgtcatcgaccggttcacccacagtgccttccagcctgtagctggatgaacacggacaatagggtgctcgcgctccacatactgaggccctgcttccgggtccttacgatcgagatatgggtgagctgagcggtagatggcagtccttccgtcaataaacttgcggaataatggcgacagcttctcatatgcggcgtatccactcgcccagagggtgtcacccccgactgtcggcactgtgtcgttgtggagatgggtcactccggcgggctgtctctcgtgtacgagatcgctatgccagcgagacgctcctcccggccgacggaagctcgctggtctctctgttgcctgcaatgctggccacataacactaacgccggggaggccagggacttgaggaacttgcggctagaagaaacacagttggtgattcgcacatggattcgctgggttggaaaaaacatacatgaacctcaatctctccgaaccactctcctagttccttctgttgctgaggagtaatatcctggtctcggaagaagacaacacttcgttcggcaatcaataagcctagctcatccttctgctggtctgtcaaatccttcagctgcaagccgacgatttcagttccaatgtgcctagtcaagtcaatcacttccttggctgcagacagaagtgctttcttctcgggatcggctcggctgccggggtctacatggacgcgatcatagtttcgcacgttgtaaacgtcgtcaatatagaggggacgagatggccggtacgggtagccatcgctgagatcaatcccagccttttctaggcgttctcgtgcagacacaggaaggccgagagtgtccttcttgggcactacgacgtcgacgatgcgtgcatcaattggagcgggagccatgatgatagataatatttggaatagtataaatcctatgagtcctaatatcaagcctacatgcagtgctatatactctgtttagaaatgtcgacttgcttattgatcaacgttgtacaactggggtttgagcacatcatcgccatcaaccatcacgtcttttgcgggccacgcatgtcacttttagttatctccggctgccatcctcatacccctcttttaggacttgtaaattgtccaatctatactgctatgtgtacttagtcgaagcggggaagcttcgatgtcacaatccaatatcaaaatcacgagtatctctaatatctaactcgctgccgtttgttccgggaagcatggcgatatatcagcccatgttgtcgtttggagggcccataagtgcgcgaacaatccacgtagacgcggatatgcaaattatctctttgtctttcttttcgcttgataatcatgagtgagtccgttcgagttgctgttattggggctgggatcagtggagtggttactgctgggcatcttctggcagctggaattcaggtgacggtgtttgagaggaacaatgcaactggtggagtttggtaagatggtgaattgtttattttgatctggaataatggactaaagcattgtaggatttatgataagcgtactccgattgaagcccagtacccatcgccaagaccgtctgcttcacaggaatatgtgaaggatgagagggaagggaatgaaagaaaggtcttgcttcatgcgcctccggggtaggtttctgatttatgtttttttttaactatagcaggcgtactcactattgaccaggccttgttatgaaagtctcaccaataatgtctcgacacccttactacggaccaaactcaacgcatggccagaaggaactgctccttttgtgaagcataatgtgctcaaggaatacatccaagacacgtcgaagaaggccggtgttgatgatataaccaagtttggcgcccgagtgacccgcgtccataaggatggaccaaaatggacggttcactggagcactttgagcgaaggccaagatcccaccgagaaggaggagtctgcagtaagttctcatatctataaaatttttcattctcagtggttctgaccggatcatagacgtttgactcggtgattgttgcctcgggccattaccatacgcctctcgtcccgaatatacggggtctaccagaggcaaaagcccaatggccggagaggatcttccattcaaagtctttccgaaggtcggaaggattcaaaggaaaggtaggagcgactgcattctagtattgagtggcactgaactgactcaactacagaatgtacttttgctcggtggaggtgtctcttctctcgacatagccactgaaatcagtggaaccgcacatcacgtgtaccaaagcacccgaaatggtgccttcgatctccccgagagtgcacttccagaaaacgcatcaagaatcgccgaggtcgaagcattcgaaccttctacatcgacatccgcgaacaccgagcacttgcccttaaccgtacatctcaaatccggggagaccttgcacggtatagacacaattattctttgcacaggatatcaaatggcacttccattcctcgacgaatataatgattacacttcgtctgcggccgaggcaaatgataccgtgctcgtcacagatggcactcaagtccacaacttgcatcaagacatcttctacatcccagatcccacgctggcgtttgtcggcattccattctacaccgcgaccttctctctattcgagttccaagctatcgccgtgacagccttcctgtctggagttgcgcagcttccatctactgcgagtctccggacggaatatgagaatcgggttaaagagaagggacttggacggagcttccactcactcaaggataaagagcaaccgtatgtcgaggaattgatcaaatgggttaatactggaagagctgagcgtggtttgcctttgattgagggtcatactgagagctggattacagagagagcggctttgaccgagagacttaagttgattctggcaggaaagcttcctagggcggatattctcaaaagcccattggaggtgggggttactgcatgacctattagaatatagacattgaaagcattcagagaagtgatattcgtagtttcttgactgtaacgtatccccggaggctctgccaaggcaggtgcgatcctgctccttcccatgttacgccttcctctcgaggtctcttcatctctccacctatgttctttcccctttagcatgcgatatcacatatttacctcatcctgggaccatgagcccacagcttcaacggcaaggcaggaatgggcccgcgcctgcctttgcgggtccctcacccggggtaagcacgtcccaacgtccctcagttctaattcaacccccaggccacatatgacaaggtcaccgcaacggcctgcaactaggcttaccataaccgtaaggtcgcgcagtcgagttctcaggcagccacgagcacgcagaccgagcttgataagaacgacccacgtccccgacttcatatcattgttgacgccaacggagattcggctgtacgagcgcatgtcactaataaagcttagataaaatataacgtgtttcgatatgtcggttcggaaatatgagatatatggcgagatgtgcaggggcgatggcgagtttctagcttgggatgacaacatcatcaccacaaatcattccccaagttggccaagcgcccaagactggacatctcgcacggattatgttgaaaaaacttgcatgaattgcgcgaacaagtcgccccttcattcgacgtgaaaattgtccgcttgatgcggagtataaatcttgaagcatgattcactcggctttaaaaagggccccgatatggctccattctatgctgacacaagctttgacaagacgatcactgactaggtaggctggccttgtcaggttagtaagtctttgatattaatcgcctgttagacttggtagtttttctgcgctataagaacgttccgatgtctccaatccaatcttttttctcattgccacgacatcaccatgtcgctaaaataccctactgaagctgttgtcgatccggcgacacagatagttcaaaaagaacccaagcgcaaatgggtcagctacatttgggacacatttgacaagtcaccacaggagcgtcgcctgcttttcaaattggattcggccattttgacctttgcatcgttgggtaagtttcatgaaactaattatcttggaaaatgctaatagtcataggatacttcatcaagtatctggatcaaatcaatatcaacaatgcatttgtctctgggatgtatggtaccatattgacccaatctcgggagtttgatattgacaactcataggaaggaagatttgggcatgtacggcaatgaactcaactacatgcagacatgctggactatcggctacgtcattggagaaatccctagcaatatactcctaactcgcatcaaaccacgatattggattccggctatggaggtaagaggttctggttctattttcgagagctgtatacttacttctcaacagcttctttggacggttcttacaatgtcgttgtcacggtgcaacactcctactcatttctatgttcttagatttttcgttggtatgcaataacttcaagcacttactctatcatagtgggttattgacattgcaacactataggtatcgccgagagtaccttctatcccggaatgcagtatatcatcggctcctggtaccggaaagatgagttggcaaaacggtcatgcatatttcacacgagcagcggaattgccagtatgttttctggttatctgatggacgcggttttccacctcggaggacgaggaggcttcaagggctggcaatggtaagaaactggcaaagtctcggcattgggtcatatactaactaccatcaaggctttttattatcgacggggtcatttccctgcccgtggctattagtggattctttatccttcccgatgtgcctgagatctccaatccatggtatttgagtaaagaggcaagtttgctttcaaaccttcgcatttgatacaggtattgacatcaaagtaggaggtcactctcgctcaaacgcgaatgaaattagaaggaagacagaacagacagccatacacaaagtcaaagctgaagaaaatctttacgtcgtggcacatttatcttctgacattgctctacatgtgagttgaatactggaatccatctaggactaaaagactgactcaccaattttagatgtttcaacaatggtgccgctggaagccagcctatcttccaacagttcctcaaagactcaaaagatcctgtatattcagtcagccagatcaactcgctaccaaccaccaccccagccattcaagtcgtgacaaccctcgcttacgcgtggatatcggatactgtcctaaacggcaaacgttggcccccgatcatcttcggtgctgtgagtgtaacaccacataaggaaatgatagaaaaatctaacactgtcccagtgcgtcaacatcataagctacgtctcgctcgcagtgtggaacattccgttgggatggaaatggacatgctacattatcagcggagctggatatggactcagtggtctgttaatggcgtaagtcatatattccccaggctataaaagtgcaaatgtcctaacacaattaccacagctgggcccatgagatatgctctgacgataatgaagagcgatccttggttatcggaagcatgaacgaaatggcgtatgttttccaagcatggctgcctcttgtcgtttggcagcaggtcgatgcgccggaataccgcaagggctttatcacggtcaccgttctgtttgtaatcttgatcatcagtacttttgttgtgcgcttccttcacaaaagagaaaaattgagaaaagggtaagtatcttgaaagtgtgttatgcttttaggctcgtgcttgctaactgatgtggtatataggaaccagactcacgaggcagaggagacggaagataacttgtcagattctgcagaaacaaccgatattgagacgaaggctatcaagtcttaggatattgatgttgttcatctatgcttcctgagatggatataccaaatggagaatagacagatagactcaaaggttaaaagtacgtataagttcccttaatcaatcaaaattctagagacatgaacggagtaacagagaccaggctttttctattgtcgacttggagagtagtccatatccaatgataatgctaaatattgatgagccaagcgttacaagttacaagcatatgttatcttatttcccaaccattttccaggctcgtctgacatctagtaagccccttatttaagattgagcacgaactccgacggagtataaaccaacaatctcggctacaagaccgtgtgatgagtcgtggtagcgtgtgatgtgatcgaatacccatgtcgatacccaagatcaaccaatcagatctccagtctccttaggatcttgatacaaagcccggtggttcaaccatacattatcgacttcggataacgcttaccgatctgactgataattggattgtccctgcatgtcgtcaatcctccatactccgtcgatgagagcattatcgcaatctagaaagatagccaggatttccgaagatccgaatctaaactcaggggtagattataggaataaatcgatagctcaagctagccacccgtgtggtgccgatttcaaagccgttgaaagtacggagtggtgttagtggcgttgcggactagtgaaggggatggacatatcctgaagtacaaattccaaaattatgatagcccttttgaaattgagagctccatcacaaaatgagacggtgggacaaggattctcttgttcctattcctggcccctagttcattgcggatacggaggaatccgtagagatcggcattgattccttttgggcaataatctcgagcttggacttttcttttttccagcttttttctctagcttggggccatagctccgatggggaatcatagggatctgcaaatcgaatgtgggaatattgagagacagcttcttattagctatgctatacctatatctccctgctcaatgtatcaacgtacttttttacctttgctccatacaatcccacccggagcaaacaggaaaatgattgccgatagggtaataagtacaaacgcctcatctcggagagcctatcgtggaagggatatatgactcctggattttccgggcccactcgcgaatctcaggggcaatggaatcggtacctgactctgctatattagacattcggatgtagtttatgatcacggaccattttctaaataggcgaacagacgcgatgtctcctgcgcggctgcaccggaggcacaattccaaatggtcaattgtggtttggactccacttagcggagatagcggggtggaagagaggattctggacaagaataatgactatttgtttaggaacgtcggattcccactctattttcccgtgcgagcaaggattaataaattgcaggaggtcagggctagaagtgagacacaacgcgatacttcacctggggatttgcgctttttttgtcggcacttgcgaaaacagagaacggagcaagagcgcttttgaaaacactaagacagttagagttgtttcacagtcttccttcaaagatcgtctgaatgtcgacgatccctcttaatcttagcgtgtgagtcggcgttcttaggtggagcgcggcaagagtcgagatcccaacgggcctcgaagagtcgaagagggggaaggggggtagtttttgagtcggaggcgatccctgggaataattccttggtgaatttctgttctcgtggaaataagtccaatttccacgcagaacaatgtccttttgggtctctcgtacgagtcgttggtccggacttgcattcatacacaatatgtatgttgtactggtcaacttcaaagacttccaagactctgatcttcagcatccctgctacagaccatgcagatcttgagctagaagtgatgagatattccttgctacccgcgcgccagctcatgcgcatgcaaatgatatcacattcgaacatgggaaatatgtacggggtaatatatcaaacagtagtatagtcaatttagtcaattgaaatgaattaaacaatgcgataagcaaaaaagaccacctgcagtacaataatccagaattccaaccaaatgcatcgtatagcaatccaacaacgccaaggaaatggggcttcatgccatgaaatatatgaatcctcataggagtctcgcattcatgaagcccagtaaaaaaaatagaaaatttgagtagctctgactagcagatcccagaatggcaaacccatgcaatccaagaaccatagccaaagacgatatatcccgatattcgtttaacatgcagacatgtgatcagctgtccgagctactagctagctgagcggcggtgattcggcactcgttggcgttgcttgggcgtgagcgaaggatcaacgtggccggtaaacttcgcagtgttgcgctgcttctccgcacaatcatgtctattgctcatattagtcccacgagtacacattcaaggataaatattctgggttcttacctggctagactatcctgacgactgaaacgccggtcgcaagagtcacagcagtacttccgaagcccgagatgaacctagagaccttgttagtgtctatgcttgattccgtctggcctccctactcacggtgttcatgtgtcgtttgagatccgagctccggccaaaagacttgtggcactcatcgcaaggatggttgtgcctccattcagggttgtgcagcttttggtgctccttgcagttggagcgtcgcgtgaattttgcgccacaaattggacattccaggccactggcagatactagcctgtcatttgacgcgcagcgctctattgtactcgggtccgtgacaccatcggagaatccttcgatagatgcttggggttgcaagacttgaccagtgttgattccagatccatcgtatccaatctcctctcccatcgccccaaggtaggacatgtcgttgacggataataggggcatcggagagggcatacacacgtccgaatacacactctggtcccattgtcctgcgccgttcggtacagtgaccacatccgatggcgttgtcggtcccgagcaaggtgtgtgcatccacatatcggtcatttggcccgcgaagacattctggccagaggcaatctccatgccagagttgtagctgggagacgcgctcatcgtcgtggggctgtagaaccccagtgaagtctctgaagcactgttgacgagtccatcgtaaactgatggatagcatgctccggcaaagtcgtcataggataatgcgaaggtgggatttggcgctccaggaatcagttgcgatggcagtgtcgacgtagggaaggccctcagttgaccgaatccattgtcgatgtcgcagcgggaaattcccagaccaataggggaaacacctccctgggacgaggtcgaaacaggagacgagtatattgaggatgcttcgcaagactgtatctcctctcttcgcggggatgtaattgaggtgcgctgaactaaattccgattcatggtgtagagagaagccgagataaaaaaaagaagaagtgtattcccatcaaataaccaaccggagggctagtctatatcagagtaaataaagggtgatcaatgcaagtatatatagtaaaggctctggagtcaacagcttcgctgttggtgattgacagtggtggcatacatcggtggctgagaggagggtggtggatagggtgtgaattcattggagaagaacttgcgccgcatcgacaccgacaaatgctgaagattcaacgacctgacaccgtaatagacaaggcagatttggagaagaaagggtctgtaattgcggtggaagagaaaatcgggtgggggcattaacggccgggggggtaagggtaatccggacgagatggcagtccaggtctggcatatgtgcactcacagagggctagctccggagagatcaagatagactatgtcatagccacctagggcaaatcaatgcatttgcagcctagtttcggccaattttagagatcgtaataccctgtaagaactactaaggtacataagagatatgacggtgcataacggcggctcttgggtttgtctgggaaaggctaaccatccatttgaccaccgttgggctggtctgcccaaccgagacgtgtcccatgcagggagtagccatacagaaacagcaccagagcccgagtctctggttcggcttggcgaggtgcattggtcgaggggcctgtcgaccaagagcacagccctgagacggtggggaatgtagtattttctgacgaagtccggaatcgggtgatggagttgatcaacaattcatgagcagaactaattatcgtgacctccgtcgtatgcgggccagcccttccgaaccgctcgatccctttggcttcatgtataccatagcgcggaaactccacattgactccaccggtaattgacgcgcccccggacaaactgtagctctctatgagatatccgaattcaacatcatggccgtgatctatttactcgcttcccccctcttgtggatcaaatatgagattgattgaaaaaggaggaccaatcttgaaacgccagggacagggggggggaagccaccccccaaaaaaaggaaaaaggaaaataggagaaaaaaaaaagcgaacgccgaaaaaaaagcaccaagcctgtttcgattaggccgtcatcgatgtggttgttcacaatatcgaacggcttttttggagttgtcaaggtggctctgccactaaaccgaacggacgccgactagcgctcagtccggcgcaggggcgtgcgtggctctaagcgctagggcagtgacccctctacgcgcctttcttttcgaacccgactccacagagccaaatcacagtgcggagccgtattctgtgcccagaaaattgtgtaatggtcacttttgctgggcaatagcctccacttgagttcgtagtcgctctatcgtgtcgatcaggtccgcaagctgcggtacttggccgacctgccccatctctagctcgcgcacggcttgttgatccacactaggtgcttttccagggcctaggcgatttgtttcaactacggaggggtggtgtgggtcccggcaccttgattcagttggttcagaagttccctgaccgcgtgctgacattgggggtagttggatagtggttcgttttgaatgtcgccatttagactcgtacgcccatatcaacgcgacaaacgggaggtgagtggctcgaagcaggacaatgcgtacgcgacgaaccgttccggcagagagaaaaagccgcatggggcggatacagaggaggggaataagattctgccgagtattagcttggaaatattccagaagatacaaagaaagattcaagtttcaacgatcagacgctaactgaccaggggtggcatgaagtatgtcagtcgccgagagttgctgctttctagcacataaatggccaacctgattggcttgtcagtcaaatggaattttccatggggcagtgccaaatttcggaccagcagggatgtttgtatacttactgaaaaagatattcttctcgagcatggcgcatcacctatcacaaaaaaagaaattaatcagccacacaatatacctagtagaccgttttcccttaccccttcgaggctcatgctcatcaaactaatcaaagatgaaagaatgagggtattggtcatcaaggcgaaagtaagcctagaagtcattcctgtcagtatctgcattacattggcaactgcgtggaagttgtagattgccgtgtgctcaaagcgccccaaaaagattcggtcacttgcatatcggaacgtgatcaaaagcacatgcgacttttttcaacgtggcgcaataaaagccaaaaaaaacaagggaacctacatcaagccatagccgaagatgggggagatctaaaaaaaatgttagcgtgcatttcaacttaacacgacagccaaccatttcgccaatattccggaataatgcggtttgagctgcagaacagccgcctggtgcgcagacttacttcagacgcggtgtcctgtcatccaataaattcagccactgtcagtgcacatcctaaagagggaaaggaacgtgggaacccactaatccaagaacactcgatctgcctcaagtggtcagccaaaaattaaaagagcggtcacgacaggggttccttcaccgtacccaaagaacactttcactaacaaatgtgacattgtactgagagacaagcggtcacgggcaagcattgtgaatgtggtcaagaaacctgtaggggattcagcattttattcggctccgacatgcttcactttgtagggcggaatgctttgccacacttaccaatatacagtactaccaccacggggaaaaacctgaagaatgcttttgtctgaaacagattgtcaatcagccttgggtcgcaaagcctgagcgaggggttgggggaaaatcgcaccatctctttcaacaccggtatctattcatatcagtcaatcctgttctaaaatagtgatgcttcatgcaggatccacttactagactgccgaagtatgaattcaagctcacaagcgaacagatcctgctcattccgtgtcagccctgtcgcacaaatgcatagtccatgagtagccatgccttggtacaagaaacagagcctccaaggaaagaatgtcgaatgagagctcaatgatgtcgttgtcgcccttggttagcccgataacccctgtggcgttctcatcagtcgcaccatcaacacagatgacctgccaacgagccgtaaggcagattgggcactcgatgactcacttgttacgacaaatgcgatcccaacaccaattatgctcacgttccagaggctccagaagtccatttggtagaaaatgactccggcatcaatgatcccactcaattcgtcatacgcaaaagcgacgatccacacatacatcactgcctcgaagacgccaacggcatcttgtctcctctctatcagtactgcgtagtagagaaagaggaaagacatgaagaatgctgcttcaaagattttccgatacagagggactctcaggcgtgaatacggatcagccgttctgatgaaagaatagtcagtatctccgcgagactatcccgtgtcgcgtctaaccttgcgttgaaaatatgaggtttcttggttgaattgaccgtcagagaaccccagaaaacgatttcacccttccaaataccatcgaccactttttgaacaactttttggctcagaaatgtctttgcattggcaattgtcgcaatctcaagtgcattcaatccaaaaaaccgggaatatctctgggcggcataggtttcctcttggtatgtatcttgtgaagctccagataaccgagtctctgtgaccctcctgctgctaaaaaggcgataaaaagaagaggactttggcaagagaggagtggtctcactttcctcttgtctaccttggatagatgccagggcagggctacctgcttcggaaccaagggtatttgtcgaaccgcgccgcggtattggtagctcttccagcagaaactcaattgtctcgcgctggttcaggtgacacaggaattgccaggcaacaaattcgcaggctgcaccacggctctcattaagtccccagtcatcctcggtggcggtggtgaagtcccatttcaaaatcctggatctgttaatcaaccaatccagttctagcgtcgtctttgtgctgaacttacatcaatgccacaatgatataagggttgtgagtatcatctgccaaagcatggaccagttgtctaagacggtgtccttgggctccgtacagcatttgctcaaacgtgtaggccatatcacccacggccatgctgatgaagctacagggggcttggttaatccagctcgatcaagatcacagacaaggcttacttgaacagtttaggaagaacatcgaatagcggctcatcaatttcgatcaccggaatttccgtatgaaccatggttttatccatctggagattgactccagggtttcctttcaataaaattggctgtttgcttttgttctccttttttttggacctagtgtatctccccttagggataaggcagaactgcaggtatcaagaccgaggtattgatggaagatccatgttttttgatcagcggggggttcaattgaccacaaataacaccgtagcaatgagctctgtcagtttaagataaataatcggcaattttaatatgaaacacaaaaattgttagaggaaaagctgacgagttgcaagttgccaacaacatcttgctgaccgccttgtgcacgtgtcgacacgtccagtgacttcatcggcttcagttcgactttccttatcgcatagttctccccaatcatctccatcggatttaatcattctctgactctgaataattgccatcaaatctccaacgggagatgatgggcagtcgacaccatgggacaaggctactccctcacaaccctgtccgcgggttcggcggggatcgatgtgcctgaattatctgacatggtgtatgagaagtcgatgggaggtggcaggtttatgaaaagcattcgcgcaaggcaaccaaatggtctggtgttcatcaagattatcatgaaaccgttcccaaccatggaactggagccatatatcaaaaacattgcaagtatgtttagatccctttttactatttcaagcttctaatgtccatctcaggagaacgaaagttattggcggatgtgccaaatgcgctgagctatcagaggattgttgagactgccacgagtggataccttgtgcgccagtacattcacagctctctctacgatcgaatgaggtaggtctgttgagggtgttactagcgaaagacgcctaacattgatatatagcacacgcccttttctagagcatattgagaaaaagtggattgcctttcagctattgtgtgttcttcgagattgccattcactggatgtctaccatggtgatatcaagactgaaaatgttttagtcacatcttggaactggctatatctttctgatttctcgtcgtctttcaaacccacattcctcccggaggataatccagcagatttctctttcttcttcgacatctccgggaggcgaacctgttacttagcccccgagaggttctctgttgccggggaagagcccagtgaaagcggcgtgaactgggcaatggatattttcagtgctggctgtgtcattgcggagctttttcttgaatcgccgatcttcaacttgagtcaaatgtacaagtatcgcaaaggggaatacagcccagaacacagtcaactagcaaaaatcgatgatccggacattcgagagttgatactgcatatgatccagcttgagccagagtctcggtactcggcggatgaatatctgaatttctggaagggcaaggctttcccggaatacttctacagttttctccaccaatacatgtccctcatgaccgatccttcttcagggcggacagatgtggatgcagaatcagccaaccgaagggaggcagacgagcgcattgagcgaatttacctagacttcgataaagtatcttacttcctcggttctaacacccgtggtgttggtgctttatctagtgtcccagtcactaaattgacaggcaacacccttcctgtgaggcttgatccgccaaagggtgaaagccaactttccgcaccgcagtcacagcccgacgagggtgctctgattttcctaacacttgtggtatccaacttgcgaaatacagcgaaggcatcggctcggatcaaggcctgcgatattcttcttgcatttgcagaaaggctgtccgatgaagctaaattggatcgcattcttccatatatcatggtattactaagtgatcgaaccgatactgtcaaggtcgctgcgatccgcaccttgacccaattactgaaaatggtccaggtggtttctccagtaaatgcctatctgttctccgaatacatatttccacggctccagccgttcgttgctacctccaacagcaagtcaagtgccatggtgcgtgcggcatatgcctcatgcattgcgtctttggcccagtcatccttgaggtttttggacatgatccaagcattgcgttcagatactcgtttggctgcgttgattccggtcggctttgagccccgatggactgaagatgcgacttatcacaatctctatgacgtggcgcgggtcgatcttctagaatacttcgaggttcacacaaaaatgctgttgacagacacggatgcatcagttcggcgagcgtttttggggtctgtttctagcctttgtgtttttttcggcaatctcagagcaaatgaggttgttcttagccatttgaatacctacctgaacgatccagactggatcttgaaatgcgcctttttcgaggcagtcatcggtgtggctgcctacgtggggagcctgaatttggagctatacatattgccgctgatggttcagtccatgaccgagcccgaggagtttgttgttgaaagggtaattcgatctctggcagccatggctgacttgggcttattccagcgatcaacaacatgggatctcctacacaccactgttggatttttggggcatccgaacgtctggattcgggaggcagcagtcaagtttgtggttaattccgccaaatttttatcaatagcggatattcattccatcctgacacccattatccggcctttcctcaagatcaaaatcgttgtgatttcggatacccaaatgctcgatgcactcaaacggccaatgtccagaagtgtgtacgaaacggccttgctctgggcttccaaatcagaaagaggtgttttctggaagtctccaagtcgcgatggcatgttcagcttgtctgagcctggatcattcagtccccgggtgggtcaacggaatccttcctttaacatggccgcccaatcaagaaatgacgaggacgagcaatggcttagtcggttgcgaaacgttgggatgggccctgaggatgaattcaagcttctcgcactcaaagactacatttggagggtctcattgcggcaatcgagagaaagtgatgtccattcaagcccacactcgaacgacattgtcagcttgacacaaaatggagtcaagccccagactgtgttctttgataaggaaattaaagatcagccgcgaccaagccactcagacgcgaacgacggcacctccgaggaaccaaggccgagaacaattgcggatgctttacttgacgcttctacaaccattgagcgaatgcccattgctcaacgcaggcacttgcggtcgaaaagccaactttcgaaagagacaagacgttcctcgcttgttcctatcttggacggaaatgatacttcctcattatcatcgtctccagtgatatcatcgcctggcggaggacttgcgtctcgtccattgtcccctccgaacattgataatgatcacatggtttccagtcgccgaccgagccctgggcaagacggctcgttgacaccaaccaacctagacactagaagtctatccgatcgtgtacataaaaagcctagcgcgatgagtttgttgagtcggaactctgccaaagcctacgcagaaaccggtacaagctccgcaaacgcctttggaaaggtagatgcaccgattcacagaggaggcacaccccaaccattgacaccattgcttccacccgagcaaaaactgacgcagaaatatcgtgcacaccattcgtatgggggcaacgaccctgcggtcctgcggctgctagacaacgtctttgaggaaaactacccgacggatctatttgatctagggccatatgtgaaagaacttgacacccggcaaccgattcacggcgccactgatcaagagccaagtaagatctggaaacctgaagggaatctagtcgcgacctttggcgagcacagtgcgccaatcaatcgtgttgtggtagcaccagatcactccttcttcgttactgcgtctgacgatagcacggtgaagatttgggacacaactcgtcttgaaagaaacttgactcctcgatcgcgtcaaactcaccgtcatgcaacaggctcgcgcgtgaaggctttgacctttgttgagaatacctacacttttatcagtgcggctaccgatggcagcgttcatgccgttcgagtcgactatcaaaaagtcagtaagacagccgtccgatatggcaagcttcaaatcgttcgcgaatatcagctgcccatagccgaagacgggtcccttgaatacgcggtctgggtggagcacttccgtgacgaagggcagtcgaccttgattattgcgacgaacacttgtcgcattattgcgttggacatgaaaaccatgctcccgatctacacactagaaaatccagttcaccacggcacactgactacattctgttgcgaccgcagacatcactggcttctggtcggcacaacccatgggattctcgatctgtgggatctccgctttcgtgtgcgactgaaggcatggggtcttccaggctggggtgctatcaaccggatccaactacaccccgtcaaggctcgcggacgctgggtctgcgtatccagcagcggcagccacggcaatgaaatcacagtgtgggatatcgagaagttccgctgtcgcgaggtttaccaagccaccccactgggcgtcggcaataatggccccaatggcgctcatcatcctccccgcgccgctcatgtctacccgacggctgtcgtgccgagcgattacgaagcgtggcgggtggatggcgaccggccagaagggatgctgagtcgctttgcaagcactgaaccaggtaccccatcctcgaataatatagccggcgatcgacttggcatcttggcgtttgcggtcggcctcaatgcccctgtcgacgacaaggacaccaacacgaaatgtggatacatcatctccgcaggatgcgaccggaagatccgattctgggatctagctcgaccggatctgtcctccataatcagtgggctagacgctgtctcagatggtaatgccagtggcaagccatactatgagcagtcccagcccggccctagtctcctggttaccaccgagcaccttcccacttcgccgagcactggcagttctcgagatgctaggaagggagccagtccgaggccgccacgcagtaccgttatcagcctgcagcagcaaatgttgctgaagagccatctggatattattcaagatgtgacggtcttgcgtgtgccgtatggtatggttgtgagcgttgaccgggctggtatggtgtatatattttcttagaccttatgttatatgcttccgatgtacgatatggaattgaacagtatctggaattagactccatatatggcatatgctcaattgtattttaggcatgattccgtacatccggcgtctttttatagacatctttcgcgaaagacataggaaatagatagcgaaatatatattaatggctgctactccgcacttcgacccctatcacggataataacgaaatagttaagcccgtgaaggtagctggcccacaggatctatattgtgtaatatcctcatcaagatgtagaacttccatttatgtcccaagctccattttcaagattaagccctcttgccaccggatacctggtacctgggcagggcgtaccggatacttcggcccacgcgggttgcagctgcatgaactaaggtaccgggtacgatgcctattggtactcaaattttgctggggagagctgtgctgtgggtcgttgcgaaacatgaaaacgctggtggagtgggttgtggatcgacaggcaggagaccctaataaggcttagagtaaggagagaggggattctggaaaggctgcggatgggattccaggagatttattattgcacggtgtgaaaggactagggaataagcgctattaattaagcttgcatgagggcggtttatcaattggttctgtttataaattttcaatgtgcgcagtaaactgtagtactacagagtagagagacacgccatcggctaacaaactacaattagaatgctgataaatacaggcataataacctcggacgaataagccgggcgagataaaataggactgcaaatttaccagaagcttggaacaaagagcttgctctataatctcggacaaaagcactccccgagtttatgactatttatacactgggtaatgtaaaacatactatagagtactcctactcgatacagaataagggtgttcgccagtgaccctcatccaatggtccatgcggtcttcccatatgcgatctcgagttctcgccagatcgctaccgttaccacgtacatacatgtacggactactgctccgtacggggccgttccttaccacatggatccagaaccctgcaaacttcaaagtcgtgcgtgaggggctcatccgggaaatgagatctccgctggaactgccagactaagcagctcggtaggcttagtagcttagctttcccgctttcacgggttagcacgagtcagtagagttttggtgaggggaaacgagaaaatgggaaagggagatgtgatgggagatgtacctggatatctggatatatattgtaggttgtgtctgtttcttgtttcctcaagggccaatgttagataatcaacattagaatcattcagggggtgttcccaaccaaggaagatcgaggagatggagacgggagtggagatgggccaggggaactggccaatcatggagattgttcacagctcagacgggtagcttgtcgggatatccatggctcacgatcttgaattcggcctctgatgaaatcggatgaacgcagatgatcgacagaggagggattgaaggaagtggtgaagtggttggagtctcctagctgctcgcaggaactttgcatatatatggttgcactgcatgcgtagataatgcttcacctactcttttcgatgtcctgataggagtgagcatcaatggttccagagggtggacttgggtaggtgttcacctccgaacggccagaatctcatggcccaagataacagtgagattccagtcagaactcttatacggtgggaaggataggtgcatatacttgataactccgagtatcaaagtttgaggtgaaacgaatagatcacaaagataaaacccaacgttaccaacggtgttggatgtatcatttccatctctttgatctaataatatgattatctcgctgacgaaaagaaacgaaaaagaaaagatgaaacacagaaatacacaccctgtaatccaaataccgtacggaattaaagtggagagaaccactttcgtcctagtctataactccctcgattcttcttctcctatttgtccctccccctaaaccctcttctttcttgggttctgtctttcaactgcataagttgtatccatatggcgggtgtgttctcgagtcttgagtattattgaagtttcacccgggcttctcacactctctaaaacatctccccaactttccttggtcttgggtaaaccctcatttcgaactgcactccagcagtgcttcccccccaattcatacagtcctatatctcaaggaatcccaaccccggactctacaactcgacatactcttcgactcgacatactcacccgatacataaatctaccacaatggttcattctctgcgagatcatggatctttggtccggccatccactcgggatcggcccgttacacgcggcgaaggggaaaattcgctggtcgttcctagccgcacatcatcgttgcactcgcgcatcacccaacctatcccgtcctcacttagtatcaagcccgcccagcggacaccgaaaacactcacccatgcgtacatggtatgtggtgtcgggcgcgaaccctcacaatgggtcaaagcgcctgtccccgaccagggcaagattggccacatgaagggagccgtcggtcaattctggctgccggagattctgggaagcagccctcggttagagcaggacaatgagatcgcacgagccctacacgcggccatgcgagcatgcttccctcacgacgtggagatctgcaccggcaagagccagcctcactgtgcacaccacgccttcgtattgcaacaagactcttctcacactctgtacggtattgcgctgcgcgtttggtcccgtgccgacgagaaacgcgcggagactatccgcgagctacgcaagaagacggagccggacttctatgataaccccgatgagacctactggattccttactgcttgagcttcctctcccggtatcccctctacgatctgctaggtgactatctccgtggcatgtggatccactggaacaaggccaccaatctgttccacgccgaggaggtctcccgcatcctcagcttccccgcgccacgtctcaatgatttggtccgcattgatatgaaggactatgccctctgctatcagttcccctcgtcgcccaccggcttccaaaactttgccatgtggccattgttcacttgtctgtcgatccctaacattgtcggcgtgattgaggctgcggtctcgcctacccgccgcatcatctttgtcagccactacgcggccatgctgacggtcgctgcggaaaccattcgctactgcgttcgcgtctatgagtggagtggtctgtacgtgcccgtggttcacgcccgccatgtcaaggagctggtccaggagcccggtccctacattttgggtatcactgccgagtgccggactctattcaacgccccgtctgatgccctcgtggtcgacctcgatcgcaactttgtcctcacctccagcccgcctagtgtgctgaaccagggccaacgcaccaagtttatcaaccgcatgacccaatccctgaatggtgatgtctcgccttccggtgtgccccctcacctgcgcactgcctacgctggcggcaagctcattccggctggccagatcatcgtcatgagaggagaggtcgaaagcattgaagaccctcaatggtggaaccaggatgctgtcatgggcgttatggaccatgtatgcgagaagctggtacgttcaatcatctctcaattgtcactaaccacaatcaaactaacagctatttattagggccgcaacaccggcatgaaggctatctttggtggctccgtcaagaagcccctcatgaccaaggtttccatgcgtcacctcaacgagattgtccgtgagcgcaaccagtactctcgggatgccatggaagcttggcaagacttcatcaacctcaagggcagaatggacaccgaactcagcaaggtcactaagcgcaacaacttcttggtcgaggagctcgagacctggaagcagcagttcctcaagttccaggcctttgctgagcagctcaccaaggagacctctgagctcaaggtcaagatcgaaacccacaagcgcgagagccgtcgcctcactgctcttattgatcaacagagggacgatgtggttcgccttactctgcgcttgtccggtactgagaagcagcgggacgatgctctagaggcactggtccttcagcaggagattgccgaagagctcgagcgcgagcgcaagcgcaaccagaaggaaatctctgccctctcgcacgccaattcgactctcacccgcgaacgcgaagatgcccagcgcgttgtcatccacctgcgcagccttatcaatggtcagagccaccacatggagcacatcgtccgctccattagtagcaggtcggagatcgctgaaatagtcgaattaggctacgaggacgcccccgaggagatcaaggataatgtgtcagtcgctgagtcgaagcattccgtcaagtcgactaaggaggtcaatggtcgcagtactccggtaaatgatatgaagcccgagctagagcagcatttgctgaacatcggcaaggaacacaagagccttgcacgtctcagcatcacagatgttgcagaccgctacctgcgcgataagaccgatgccatcgcagatatcatccgcagcatcagcgaccagtgtgccgctgccgtcgaaggcctgcacctggcccaggacgccgaggacgagcaagaagccgagacctcttccaatctccaccagaacgaccgtcgtggctccgaatatgacaacatggagagccggtccatccgcgcccctagcgagatcagcgataccgacaacagctatctccacccggacaaccgccactccagcatccccccgaccccggatctggtccacaaccgctccagcacgtctatgtccatgatcagcaactcgactttccccgagcggtcaagcgggcagtatggccccagcgatttcccgacccggatcgttgaggatgatgatgagcacgctcacgagactgagaacgttgacgaccagctgactgagcgcggcactctgtccaagcagaatagcgaggatctcatgcggcccactgccacacgggtgatttaaattttcgaccagcttttcaggttagatgactgagacgatcttgttttgtttttcccttctcttctctgtcaattccttgttgtccttctgtctggcgaggccttccacccggtttcttttacttcatctctgctgtatcctgaatacgcacatacgctttggttgtctggcgtatatcccatttctcgtcgtgtcgatttcttcattatatccactcgatcatctatgtgtttttcttgtccaataatttatggtcatttttgccttcctgggacttcttattttttttcctctctttgttttttttttttctttttaccccgttcttcccgaggattgtttattcaccatatgtcgtgccgtctgggatggaacggcttgatttgtttgatttgccctcatctccagagagccctccactttgcaccaccatccgcattgcctgcggatgatatttccttttcatctacaatccttgatctggattgatccgatctaccagggtctatatagctccctgtcctccaaaatggattctgtgaatttaacttttcgaaattgcctcattttacatccattgtagccaagccactccaagaaggcttatagaaccacccgtaggattcatatgttaatcatgaaactatatacatcactcaaatgcagacccaatgccaaaacccatttcaagccaacttccctggcacaaaaggatgaccagcactcaacccgccacagaccgcccaagcctgcccattaacataactactctcatcactaccaaggaacagcgccacacgcgcaacctcatcagcaacagcaccccgctgcaacgggttcaactgcccgaccttgcgctccgtgccgcgctcccgcgcccggtcaaacactgtctgcgtcatcccagtctcaatcagcccgggacagatcgcatttatgcgaatacccgttccagagagctgatacgagaccgtctgcgcgatcgacacgacagcagctttcgaagcggagtagtcagttgaaccggcgtttgagcgcagacctgctacagacgctgtgccgatgatcgagccgcctgggtacggcttcgaggctgatgttatcttcattgccggggcggcgtgtttggctgctaggaagacactgtttgtcgcggttagattagattcgtattcgtttgcgtcggggagaatcccgtttgctacccttgtgtatcagggaagagaagagaaggatgtgtatgtaaatgtacgtacccgagggcgtttactcgcatcgtgtttaggaatcccgcactgtcgatctcggtgaacagcttcggttggcctattacgccggcattcgcgaagaagatgtctagtcggccgtatttgctgactgcttcgtcgatgactgctttcacggctttttcgtctgctgcgtcgaaggtccgcacgtgcacttctacttttgggtacagggtctccatctcccgcttgtgcgttgctaggtgcgtgtcgctgaagtcgcagatgtagactgctttggcgccgttgttggcgaattggtgggcgctggctcggccgatgccattgggagagtttgcgcctggtttttattggtatgcttcttgaatggccttgggaatcaatgtgtgttacttaccggtcacgattactaccttgtccttgacgcgactgtagatttgattagctatgtttgatcttgtaatacatacaatgcgagaagccgactgaggaataatagagctataagctttaaggatacttacggtcctgctgaatcagaggcaacatgacggatcttgggaatatcctcaaacgtgccctcgaagggaatgccttcaacgagctgcttgctcagggcttgaagacgttgctttgctgtatcagacatatttattgaacttggggaatcttagaaggctgataataagaaaaatgacttgaacgtgctacaaggtccgcttcaattgcggtaccctcgtagttataacagcttagcagctttccccactatgtcggttatgcggagagccgaggctccagcagtacagcagtgcatagcgaccaatatggtaacacgatcacgtgtaaatggatataagcattgaatcacatgacactcgtcaggtcacgtcatgtgccgtagggtatcaaagctgtctttgtgggtttccaaacaacgcaaatttgtgctctttgtttcctcatgcttttgttgttctaaaatagggtatctagggttgaaatgcatacctgcccctgaacatccggtcgatctcccttcattccatccgcggatcactacagcaaggatcgccaagcacgcacggcaagaccagccaagtatcaaaagctacataagctacttgattatttgtcttgttagcccgggcaccgtttgcaattcaatgcaattcacccatctccgaaagctctaagagaagccttcatgaagccattaatccacgattttaccgttcacgccattgcccggttgttgagtcatggcggattccgacacccactcccagcggcgttcatcgtcccaagcctcaagcgcctcgagcagaagtagaaatgctaagatagctcgggctaaaatgcaaaagcgccactcgggctcctcccacacaacgaccgacttgacctcgttcccctcgctctcaccaccagacaaatctccaatcctcgcccgcggcctttcgaatgcgttgttcgccgacgaaaacagagcggaatcaactggaggcgtgactaaccgtgggcggaaggctacgctagaaaatctgacgaccgggctcaaatcaggccgatctgccctcttcgccgattccgtctcgacacacgatatcccaggcgcgctgcatttggctgatgatgcgcacattgagcggctggttgccggaacaggcgccgtgaagatggtgaggcagttcgctcgcgatctggctcaacgggatgctgagatctcggccctccgccaacgcgccgatgcgagggagcgagagttgaagagaatgctccgagatgtgtctgtgtccaaccaagatattgaacgccgtctctatcagttggagaatccgccgggtgatcgtgtctcagacgcagaaagtactcatagcagtgatcatgctggtcaagcctattctagcttgaatggactgatgtctcaagctatggaagacaccgttggctctcggcctcatggtgactccgcagaagcccaggccacgattcgcgcccagcgatcagacaatgatcgaggtagcggagtcactgacagcggcaagcgtcaaagctcgattcggggctggcaggagtacctttttggctcgaccaatacgagccggaaaaccagtcgcgccagtagcgttatgagtgatgtcggtgaagttggagaagaagagactgagcgtcttcgggtgcccagcaatcctgcaatgcgacgcaaagcgctcgatgagcagctatttcaacctccagatggcccggcacgaaacggaccggcgaagcgcattgctagcacgtctgtaaatggcgacgatgtaagcattcattcgcgcaaatcttcacgttctctcggctcttggactgttaagttatttgctggcaatacccagtcgagcaaagatgcaagtgatactgagtctatccacaataaacctcaactcagaaggcctgacggagacaaaagtacttcgtctacattttctgccaattctaagggctcaatgtcggcagtggccgcactgaagaggattaacagcaatgtcagtatcgctaatactggacgatctgccagtgggtcgagcgtccagggcaaaatgaacactcctgccttgcgacgcaatgcagctggcagcgtgtctcagggcgcgacgtcggagactacggatagagcctccacaaatcttggacccgtcgagatggacgccattctgcccatggagtcgaagcctccgacgctgacgcctatttacaacaattcccaatcgggtgagtttctcaccgaccggttcggtttcatctatgatcaacataggaagaagcgccagagagaagcgaatactatcaagagcggtaatcgcagtttgagtataaccgagactctcggtcatcttcgaactgatgcgtcagatcatgaggatgatcccgagatcaccaaacttcggcaggacgcttccgagacctcacgttctctacctgattcaccagatgaccctgaaagtggaggtattgccatccgtcgctggcaggactatctgaagatgccgtcccgtcctacagagctattgtccgacacgccctgcgcaggcccgattgtctccttgaccactgcaggagagagtcgctctcatagctcgtctgtttcctacgacaaagacggggcgttggccgtcgggtctagcgcacagccatcggcgtctacatcggctatcacggccgacagccccgaattcgctggcttgtcatcggatcagctcaaagacacagccgccagatttactgtcgcagagatggaacctgtaaaactgttgttggaacagttgactgatctccacgatacactgcaacgtgatcgaaccgtgagatggaacgagttccttcgcaaagtgcgcgctgaacgccgaaaagagggcgaagcggcagccgctgccgccacttccgatcgatctcttgctgccgttgacacgccagaagtctcgctcgccgacggcgaagttgtaggcatcgcaaatctgggtaacaaaggcaaggttggccgagcgaagtggcgagaattccggctgctcgtactcggcggcatcccagttgctcttcgcgccaaaatttggtcggagtgcagcggggcttcggcaatgcgaattcctggctactatgatgaccttgtgcatggcgttggcggttcggaccccgacccctccgtcgtcgcacaaatcgacatggatatacgccgcactcttaccgataatgtcttcttccgcaaagggcctggtgtcggcaagttgaaagaggttctgcttgcatactcgcgccgtaacccagaagtaggctactgtcagggcatgaacctaatcgcagggtctttgctgctcatcatgccgactgccgaggacgcgttttggattctaacctcgatgattgagatcattttgccccaccactactacgaccatggcttgcttgcctcccgtgccgatcaggtagtcttgcgtcagtatatctcagaactacttcccagactctccgcccacttggaggaactgggcattgaactagaggcactcaccttccaatggttcctatctgtcttcacagactgtctctccgcggaggcactgtatcgcgtatgggacgtggttctgtgtctcaatgtgaccagcacaataaacggctccgggccaaatgcctctggtactaaggagagcaacgacaagagtgccaagaacgccgaaaatggtgcctctggcagcggaggtggaagcacattccttttccaagttgctcttgcactgctcaagctcaacgagccacagttgttaacaacctgctcgacgccggcggcactctacacatacatcaaccaccaaatgacaaaccacgcgatcagtatcgacggcctgattcaagccagcgaagcactgcgcaatgtcgtccgccgcgaagatgtcgttgcacgtcgtgctgttgccctgcaagaaatgcgcgaattaagcagcggcgcaagcacctagacacttgcctgatggaatttctcgtcatggcctttcattcatttccccctgcattttcgcgtaacgccgataccacctgagcataaggcaaggagttttggcttttctgtccttttttttttctcattacctggcgctattcccctcattattcctcggttttgtgaaagcacttgttgacatagcccgcgatgttcttgttgcctgtctcatataccatcaacccagcatttgagatacccctggattttacacttgggcggcagcacttttagacctgtttgaatgaaatcgaagtctttttcaatcggcattattcttgtgcattatgaatctttctgcaactctgaagtgtctaacgtggcttactctagggctgtcgatttatcttacaagttccgatcctaagcagaatcgaaatcatacaagggacaagcttattgcttcgtatcaaacgacaaatgctaatttacttgctatgttttgaatcattttttccattttcgctaagaaactaacctccatgcgaaaacagccgatactgcagttaaacgacaaacccaagcaccacgaagggaagcattgaccaaatctttccaactaatccaaccgaaaatcatcaaggttctgctcaaatggccactcagtcagcccgtctcaggtctgggcttcctcgtagtcccctcgaagtcagtcaatgccggttcatcggccctctccatataccgaaggacctccaactggtgaagcttgtattcaaatgtctgtgcatcggatacacttctgcagagctctccgtcggtgctgatcggagctgtgattggatacggtgctgttgtcatgaacctggccttcaactgcggcttgaaggtctctctggctacttttattctccgaccgtcttccgcgccgctgtaggcgtcgtatttgatgttggcttggtccatgagacctatgtactgatatcagtattgactatctagcgtttcagaaatctgacaaacgtacgctccatatgcttgatgtaaaggcacattctctgatatgtccgttgcagctcgcgcttcttggtggctgctctgacatcaatgtccagcatccaggcaatcattgcgcaagatagtcctatcaatatctgtcagcttattgtctttgagtgaacccaggtttcatgttaacctaccgtctttgctgtagccatattgttgttcaccctgatatggcgctggaaccttttccatgcgattcacgaaatccggaggcatattttcagcggccatttcaggcgaaaacactgaaagggttggaagatatggaacgaatgttgaagaagggagaattcgttccttttttctatcttgcttcactttctcttctgcggagagtcggagacggccttctctttgttcttccccggtctatctcaaccagtcagtctgacaggaataattttctttgtcgtcacatatttccaaggctctagaaagttaaatagctgggtgttgcggtgaaagccgaaattgggggaataaaacatcttgtagccacattctttgttctcgaaatagatcttgtatacttcaacatgtacgctttgttcaaaatcaaagcctgcttcctctgaaagataggctagaccagataattcaaggagtcaatgtctccatctggattctgttgtcgcactagcgtctatataacaccctttctctcaagtccatcccctttgataacacacatctctctctcgtgtctttgatctatcatctcggcaaaatgaattacgagcgcatgtcagccgaaatccctactctctaccggctatccagggagtccagaggtacatagtcatatctccctatttatttcccttgaaccctccagcccacgagaactaacaactaacaaatcatcagaagcggaccttctcaacggtcttctgggctggatccgcaacgaggcctttggaaaaatagcagaagcctgtgctctctggggtgcaatcgtccaagccaataagcaccttgccaaagtcgatcgtgagacatgtcatgcgctctaccttgttgatcgtcgttgctgattaggttactaatctaggtacgctgcacgctcgtaatattgaacatgagcactttaatctcaaagaagttctgaattccgagttgaagcaggctaaggaaatgatggatgccattccgggtggtagacgtgcaactacggtcactaccgaggaagatttctcgcttgctattaagcggttgaagtttctccgtgaatacaagtagtctgcttggtttctggactcgaaggaggatgtaatttctggcattgatatctcctatgtactctatatttcaatgaataaggctgttgttcaataatataaggtcaggtaccggtggaaacccatttccctcccggtaccagtcaagaagcgggcaggaatcggatacagatttataccattatgttgtatactccgaacttgggtctatagccctaaggagggccagaggagggccagagtcctgcaaggggttggtggaggcggtgaacacaccagccctttgatgaaaggtcaaaggctggtgagcacgctgggcccgggcacgcttttgacttggttcaacaagtgtcgaagtcgcgaatatcagggacggtgtgaaaggtcgaatcggaaagaacagaggtagtcatatcttctttcctcagctcgggctctgatccacccagaactgactgttatctaacaccgtggtcagatccagcgagtccatcgtcggacgcagtcccaaatccatgacatcccgtgcaacggctttgatctgccgcatgatcgactgggaaatggcccaggtgcgagccaatgacttgaagacaccgatcgtcaacgccaggcggtcgcggctggggtctggcatttgaccggctttgacagagcaggtggccagttggacaatggagctcagagtaagcgcacaaataaagaatggggtgtgcttgacaacgggcagacggaaggccgcaaggcgggacaactctcgggcggccttcgcggccttcatggcgtgctcgttgtgcgagaacgcagggacattgaccgggccatggtggccacagattacttccgcggcaacggcgggagatgaaagaagatcagagcgcgggaagttgaggtagatggctgcgccgtttaacatcatggttgcctggaacatgatctcatccacgcttccatcgggtcgcaagagctctagcttggactctggcaagtgatggctccaactaccaatacgggcatcaagggcttctacatggtcctgctggccttcggtcatatcctgcatcgccaccacgcgaccgagaatccgtatggcttcaatacgataacagtatgaagagaagtcacgttcttcttccgcgaacacgcgcgcgtcaaactgtgcaatagtcggagacggtggcggtggtagggcgtcatggtagatccgctcctcgcatggaagtgggacctcgagcggtacttggttggtccggtactcgcgctgcacgccaagggcagtcatgagaccctcgattacaaagagctcccaccaggtgcgccgcagagactcggcgcggattggatccccattgcttacaacgatggcaaacgtcgcttgatgcatgccaatctcaaaggctgtatctactgcggcggctagacaaacgccggcctcggcgcgctcattatctgagtgaagcacaatcgccagcagaagcagcgcctgcaccttttccaccgacgcattttgttcttgaaccattgcgacaaccatatgccggtacgtgtcactcgaggcggccggggtgaagtgtgcaccaatgaacttcatcacctgctccaggtatacggggaacatggagcgatataggagccggtggggcggcaggattggatgagcggcgtggaaataattatagtagatatcgagcaggtagccatccccgccgacagcagaggaagaatccggtgtcagcggtccgctggttgggcgaacggatggaacaattggcgtcgagaaaccgtgcagtccaggactagtcgattcggaggagggtaacgataaggtcggcgcataagtgaagccagcctgcgaggcccaatctacggggccatcgagcatgcctaccgggttgggatccatgcgcaaataatccggcgagttagcgcggcgctttttcgacgggcccttatagcctctccgagactttgtatattcgcaatgggatcgggccagttcacatcgactgcagatgggagtcctgccatcgcatttgaggtgtttgtgacgacattgaagacaggccaataatgcgggacccggtttggacccagtaggggcctgcaattcggtcatcgtgaattaacgacgcatataggaaatgtctcaagcgaagtagaattgactggcaccgatggaatagaggggaagagaagagggggagattgaagaagttcgaatgttctcatgttcccggggagtggtaatttcgccatacgctagggggcaggccattctctctttcctaggaagagcttgtgtatattcctagagaggttctacaaggatattccctacagaggtagagaagtacctattgtaataaaaggacaaaagtactaaaaaatataagcgttttactatggaggaaatacattacaccgtaatgcgtatacctccttacattaccatagctctctttcacctacctccgaccttgtcaactacatactcccatctccctctacttgattctcctctcttcgtgtcttcttctcttccgttcaatcctttcaattcatcgaagagagaaaatcccaattcctgcttttgcgaccaccgcaatcacgcacactgtgtagcgtcacttgaactactagccgacgtggcttctccgattatatcgcccacctcttaacgctttgtcgcccgactctcgttctgtctgttgattccatctgcgtcctctgtaacctcctttcacaatgatctccgacaacgacctctaccgcctcgccatcttccttggctcctgcgccatgatgatgattgtcctataccacttcctcgatgtcaattccagtgaggaggaaccagagtctgccgaatcagcaagccagattaaggctaaggatactgtgccagtggtgtccacggacagggtgtcggcttcagagaaggggaattgaatccgatttacgactcgggagagaaccaagataccagtgcctacatcttttgattttacttttaccagcgggtcaggcacaagccaattgtacacgacagtccaatcaattggagagaaaggcagtctttgcaaatctcatggctttattcattacttccattcgagtaatttggaaatgcgtgggtccctatggaattcaccgtctagatttagataaaagcagaacctcttttaaggtgtcatctaggtgcaaatatttcaagccctgttatagcaaggtagcatattattatatgctttcaactttcaaagctaattcacatgcaagccagtcgctatgcgataaaccgagggaaaaaaaaggaaaacaaaggtatcacaaaggtatcacaaaagccgatcggatgcatcaatcattcgcaacaaatgccatctccccacagtgtacattattctgccgcgccggtgtcgacagacgacggtcactccagtccatatcaggcccaatctgctgtttccagtgtcggccagcttcgagtagggcttgcgccttggtcttaatcgtcgatttcccatggaccttgctaaaggcctcgactgcgatctgttccactggcaagatcatggtccctttgcgggcactccggtcacccataactgaagggtgattcgattgaatttccgctagagaatttatccgattagacattttcttcagaccaaaaacatcgtgtgtggatcagccccatggaggagcatcaagcgcaagcaagttgtgattctcaccagttactggtacttttggtccatctccaagcgcccaagccattttggaaatgtgctcgctcgacaaatgcctaaacatatcggctgcagccattggtgtcttattgtcacagtcttcccatttgcacacaagagagtgtgggatgtgaactttcacaatgtgagcccgaactgagtcaaggttgtgaagttctgcaatgcatccctcccacttgcatgggaatatttgataatgcacgggctgttcacgggggatggcaacttcaacattgttcgccacgctcctgggaggtcgtcctggtcttctcttcggtgccatcttgggtgatagagggataacaacttgtggctgcgaaagacaccttgcctctggggatttgacagtccgattagagtctgattggctcttgacagtctgcccttgaggtgtaggctgcgttatagattggggggtcgcttgttttctggccggcggggattttggtggagctgcactctttgtggtcgagggtggtcgctgttgtggtggtggttgcggttgcggttgcggtgacgggggggttgggaatgggacggatttgcgagacgagaaattcggcgacgcaggcacggggtcaattctcggaagtccagaagggaagttggaagaaaatttatgtgaagaataattcgtcggagcttggaaagacaaagtaccccaagggttgaaacctccagaagcgcgcgcgtcgatactttccggcgttgcgacttgacggtttggcggtgtgtcacgcgacggcagcgatgcgtggtcacgtgcaatcgcatgatttggtgtagcacgcggaagtaattgctgatctgcttgcagcgattgaggatgaggtggtcgaagaggtggcatttgtggtggttgaggatgaggaagtggtcgggaatgagtaggaagtggtcgggaatgagtgggaagtggtcgagaatcagtgggaagtggtcgggaatgagtgggaagtggtcgagaatcagtgggaagtggtcgggaatgagtgggaagtggtcgagaatcagtgggaagtggtcgggaatgagtgggaagtggtcgagaatcagtgggaagtggtcgggaatgagtgggaagtggtcgagaatcagtgggaagtggtcgggaatgagtgggaagtggtcgagaatcagtgggaagtggtcgggaatgagtgggaagtggtcgagaatcagtgggaagtggtcgggaatgagtgggaagtggtcgagaatcagtgggaagtggtcgggaatgagtgggaagtggtcgagaatcagtgggaagtggtcgggaatgagtgggaagtggtcgagaatcagtgggaagtggtcgggaatgagtgggaagtggtcgagaatcagtgggaagtggtcgggaatgagtgggaagtggtcgagaatcagtgggaagtggtcgggaatgagtgggaagtggtcgagaatcagtgggaagtggtcgggaatgagtgggaagtggtcgagaatcagtgggaagtggtcgggaatgagtgggaagtggtcgagaatcagtgggaagtggtcgggaatgagtgggaagtggtcgagaatcagtgggaagtggtcgccgagcttgtaccataggaacacgggcccctggtaccgagctacctgcagatgggtcgtttcggggaggcattgtttgacttccgccattgtccaaccgtcgcatcttcgcgggtggcatagaaccatgagaatgatcttgggatggaacccaccgtttttgctgatggggcggtggtatcggcagtgggtgaccccgcgactgcgcattcccagcagtaggctgctgtgccacggccgagtcagaaattgtacctcgtcgaggacctgaagtatgcgaagagttgtgccccgtgtgagaggccacggggggagtgaatgacacagaggctgaggataccactggcgtgctctgtacgttttgtcgggagatcggaggcttctggtttgtctggtttgatgcctgtgtagggggcgctggaggggcaggggcagaggagacaaaagaaacagaaggactgcgagttgagacaggctggaatgttgcggggctgcgaaccctatcaggcgctattggtacggctgactgcacatgatcttgattgcgaaatgagggtaaaggcgaaattgggtttgacctcgcggaattagtagacggaccctcccgagtgctcatggctggtgtaatcgaatggcgggattcaactgtgctgcgtgccgctgagggtttcaatcccttcggcgagtccaaagcggtgtcaatctcagcacccatcgagtaggagcttcgcggcgcattctggtgaggtgatccttgagcattctgggggatcgtggaatggctttcatatgggctttcatatggactctgcgattctcggggccttgttaccggtacatgtgtcctttgagctgcagctgaaatatatacttgttgcgtgtcctgggcaggggtggtagagtagctctgatacggtcttttatgtgattgggaccgtgccacaggtgtatgtgtcctttgaactggagggatgtccgtagtggaataaggtgatcgctgagtattgtggggtggaattgtagagtgggtgtaagaaggactttgcgatgcggacgttctttgaacttgtgctgccattccttgtgtcatgtaccgctgcatcgagatctggaaattctgatttggggttgccgagtagccctgatacgggcttcgtgatgtggacacagcctgtgccatgggttagctcgttctctgtgtagaggctgtcgatcttatagtctcgcggaccctatgggtgctttgatgggcctctgaggagcttactctggagttaggagatctctgcgggggcccaacaggaatttgggcgcggcgatatgcatcttgacgtgccagagcatccgagtctttttgggacagagcggagggatttggccgttgagttatattgcgagagcgagctgtttggtattcagaggggccataaggagcattgttggattgaatattgctatttcgttggtgtttatttcctccatactgttcacccgaggcttgggagtacgcctgagacggattcgaggcatgattaggataggttgacctcattaacatatatgtcttctgtgcctgctggtgcataacggccgctttagccacctcctccgcatcgtgaaatgccggatgtgtttcatgagcctcaatgtcagaactggggtcgtggccggtttgagtatcggctggaagaaaatgctgaagccaatcatatccgtccatgcctccgtgaaccatttcaaattgtaccgaggctatatagcagctataagcgcatagctaagatgttgtaggaccgagcaaagagaaggcttgattagattccgttgcgcatggagggttggatcgtggccggacagggggaaagcgggtataacagatagactcaaaaatactagcaaacaaaaaatggcaaactgaagaatcaaggaaggaaacttcccacggtgctgcaaaagcgcggccaaagagctctggcgatgtcgagccacattgagaagcgcgtcggaggtggatcccgctatcagccaatcataccacgggcttttgtggccttagaggtcaggtgtctagtcgcaagccctgagatggcttagcgggaaattagtaagcacacaatcccggggctccaacttggaatattcggctacaccagaaaagatcctctcttcgacccaacgccaacgacacccgttcatttcccactcacgacctttaagatggctgtccgaacccacggtgcgtactctctcgcatctcgccttgcgccgatttgatttaccactgctcgaaacccctatcaatacgaattttcgccaatcttcaactttcaatactgatggtgtctccaggtatcgcctcttcgcggagcaagtctcgcaaggcacacttccaggccccctccagcgagcgccgtgtcatcctcagcgcccccgtctccaaggaactcaaggagaagtacggagtatgtaccacatgaacctccaaatcgaatctgggtctgttcgggtcgagtttttggaattggaaactacggacgatacaggcgccagaatggttcaatacgcgacgattctaaccagtgttctgtgatagatccgctccattcccatccgcaaggacgacgaagtcggtgagtttcattgatacaacctgggaataatctcgagatctcgaaactgactactatatgcagttgttgccagaggttcccagaagggacgtgagggaaagattaccaacgtctaccgtctcaagttctccatcttcgtcgagaaggtacgattcgaattcacatcacgcttattgcggatacttactgcggttttagatcgttcgcgacaagagcaacggccagagcgttcccattcccctccacccctccaaggttgtcatcaccaagctgcacctcgacaaggaccgtgagcagatcattgagcgcatcgccaagggtcgtgaggctgtcaagagcaagtcgacttaagggatttcttacgtgtggggtataggttcatgttgcaatggcggttgacggcgcgggttcacttgaaggactctgagaaacggagtttccagcctgctatgatcagggtaaagtttctgaaaccaggtgcattgcgatgaatgaaaaatgaacaaaaaatttcctttttcttctatccggagtcggtgctcgcaaggcaattcactttgcgcagccggcgttcttcttccttcgtctcccgcgcacataggaacctccgtcgaatgctacagctcaatcttcaggtcattacgttccttgtccagtttgcagctcgtccgttctagcatgcttttccttgctcgattttgtagagacctgtctccactcgcttccatctcttttcctctctattggaaaccagaggtgtcgcctgatatatctcctcgtcaatcccgtccttttaggacggatcccatggttgaagaggtaaacacttggcgtaaactattaacagggctactgggaagctggtagcctctgtctcacctgcagactcactctgatgccttcgggcaaggacgaagtgggtttgaaggtgaggtacatatcctactccaagttggggtatatgctgtaaactgtagggatcatatcttcggtgcgggggatattggatagtggatattttcaatcgatcagttgatttacttgtctcaatgttttctcttcaattttctaacatttgtcttcgttacttatcatttggtatctatgtacctatggataggaaccccgcatggatggtatgatgctggctgcatatcgtcaagagcggcagattgcagtggctatggaagagatcaacgagatttcgatgcgcccactgttaggagctttactgtctaaccatacgcactcaaagatggtcgtttctttctaaaactcggtgaaaaatttgcttatttgacttatggatacatatcggggggatccgatgtatatattgtcgccttgctcagtagaatcagtggcaaaatcccaactagacaaccaatcaatcagcctatgaaatctttataccttattgcataaacgttcacttctttagaaacaaacaagaaattcatcatttacaatagcccaagtcttgacaagaggagacatctgaaagttgagacataccagacctactggctagacataagtcaccactcaagtccttaaaaaatatatgcaaacttcaatatcataatgaatacaaatcagatagctgtaatatacaagctcgagtaagaaaataatccaagtagtaaaaacggagcaaactcagaaaagcagaaaagcagatgaccatcgcatcgtggtctcatgagaaagtcgaaacccgaagcaaccccagagactggatatttgaaaaaaaaagcacgctcgctgaaatattcgactagccaccctagagtgcgctagtgtccaacacacttcccccatgcaggtagtccacaccccataccaatgaacagatacagcaagaagataatgacgatcacaatcataatcatcaacttggtattcttccaccacatccgcctccgcagtccccggctacgaatccggaagtcatgcgcacttccgccaagccgatccgtcttgtcaaccagcagatcaatgcgctcgccgcgctccaggacccgctcgatattctcggtcataatatcgcggacgctatcgatttcgcgccgggcggacgcgagggagtctgctggcggggcggtgttgtaggattggaggagagagcgcagctcgttgttgaaggcagcgcagccgtaggcgggcagtgtagcgaagtcggttgtggacgggttgtaggtggttaagaacttgcgcttcatttctagcaggtaggcgaatgggatgcggcggccttgctctgccgatgcaactaccaggaagctcaggggagcgtgtgagttgggctccgcaatgttgccatcgccggattggttgccggttggcgagtcggcaatgtaatggacgaacagtcgttcatgggtgaaggtgagcttttgtggcttgtcgtgcgtgatctttgggaggatgattgaggctagtgacgaggcggcactcgttgaactacccggcgaggagtgctcggccagaatggtagtgcgataggcgatgcatgagctgaagttgattacattgttagtccgaaaatagtttctttgactgctcaaatgtcagacagcaagacttactagagcaaagagctcgtcttggaggatgaggccatagtgatatgatgtcagtgccgtgacctcaaatatataggacccgtagtagaaaagaggagtaattggaagcgatggaagagctacagtttccaagcgcttgtgatactcagatataggacctaaatcgtttgcaaggtccggtggcagttcgcccgcctgcctacgtacgtgcccaggtgcgcaaagacgctgagtcagcggcagcggaccttaacccggaccggttatagctctggagttgttggtgtcttttatatgggatgagattattagatgtcaggcagagttgttcatctaatacatttaggcttccaactgatagtcacaaccgaagtgttttgtatacaatcttctattggtcttattgcagtagaattccaagcaaagaggatcttcacttcctcatgtttaaagtcatcttctgtcagtgatgtatacgctctgaaggaggctatggataatacacactggacaagacttaaaataaatgggatcattggctcgcttatggtagatggggtgattataagctggacacttcgtacttctagagttgctattttgatactactagtacctacattcacgaagtacggagtacctatatcaatcatctgtcatctatagtagagatatacagagcacaccgtaggcgatcttgtgcattatcgggtacttatttgctttagatctcgatgctttctacacacatatcactaatacaagaatagccccaaagaattgatgtagaatttacatacaaggcatacagttctatgtaaatgcaagtatctaggccttgctcatgttccacactgaatagtacaccaagatattttattttaaaaagtatggaagaataaggagaacaagaaggagaagagagagctgtctaagatgacctcgggaagatccgaagtggcggacaccattaatcaccatgtggtcatggccatgtcattatcctttttcgatatatatccagcgcggaattgattctcctgttaagcaattgaatctcccgaaacaacattactatccaaaacaacctcatttataacctcaatcatgattagcatgtcagaagccttctatcaaggtcggagaccgatgaagtcagtatctgccctgggagtagatgttctatactgacacagaatataatcagaggtcgcagcatcgccttgctaagtgtctttggcgtcattggtggtacagctttaatgttccgcttcctagctccccagccaggcacgctcaatacgagcaaagaggtagcgacgtaccggggtggcgagtctgaacaaacagatcaaggcgataaatttggacgcactgcccacccgcctcgaaaggaatatccagtgtccaggccaaagttttaaggggaaatggtgccgggaagcatgaagcgtactaggaaataaggattggattggctagaaaggttggaatattgaagatttcatgtatggattgatgaatattgaacgtcgaagccgttatgtaccccgaatgagatggtatctggtatccgcaaatcaaaaagccaacgcgccaggtcaaaagtagatatctagaaagcaaaagatcctccgaatcaatttacaggaatttttacacggtgctagcaccaaaggatagaatgtactgaatagttaagaagacggcagggtatcatcacccggctgatttcctgtgaatgggtcttcaccactagcagcccggcttgcaggtgaagcgacactcttcttcttcgagtctttcttgtcacgcttcttcttctcacgcgtagccccccgggactcgtccggtcggcttgggctgcggctagactcgctgcggcgaagatctttgaattctttaatcacctcacggaacccttcttcgatgttgttcatgcgagctagaaccaacttgctgagcatgtcttgggtttgggttgggggttcacgacgaacgggtggggcaaatcctagttgggtctggaaacttgacgggagggcaccggaaaagccactcgccacggccttgttgtcgcctagatcagatcccagatcgtagagaagggatgatcgaggtcgggtgcccgtggaccgattagttaggtaatctatatcgggaacggacatatgtagtccaattggagggttccgagcacgagatatgtcgtgacgcttcatggtaccctgatctaacgaggtggaggcaaaagggggtgattctccatcggaggaatccgtatccggccgtgtaggtgtgacccggccttcggtctcttcatctagagatccaactggattgtacaacatggtgaccccagaagcattccgtgtatgtctgatgcgacgtgtagggctgttgcggcgcgacatcattcttgcggtagatggacgagagctgtagaacttgggcgacggcctctccgcaccttcaaccgagtcagctgtctcacccgtggaccctagagccgattgcttgttatcatttgagtcaccatcgttgctggtaagttcgtcatcaccctccatgtctgtatgaagggagagttgtcgtttctgagtgggcgagatagagggtcttgtgcgccgagaccggatgactgggctggctgcgcagcttgttcggtcctcaggattcgaagcaactgatcgggtggtttcggtgaaatctcgaggtgggttagataatctagcgcggaatggaaatttgaatcgttgtcggtgcatgccatgacggtccgcaactagcgagtccacatcatcgggtccattagctggtccagagccgatctcctgcatccagtctttgatgacattattggtctggcgttcatgcacagtgcttggtgggcctcgcattcgatcgccacgatatgggcgtcgaaacacttcctccaacgcccgatccttctggtatgttgccacagatggctcccgtctgagaaccgatgcactggtgctgaaaccacggaatcgacgtggctgttggatatgagctggtgtttcattttgtgaagtaggttcaattagatccatcggctggacgactcgagaactgaggattgtcttctcatagaggcaaattgtaaataatatgggtaagtgggttatcttgataatggtccgattgagccgaatgaagtcacggaacggcatcagggatcggaatggtgtcactagccaggcaatgatgtttgttggtgccacataagagaacaaagcatcagacttgaccatcgagatggtattgacagcgaacaagaactgatgttcttcatttgcattctggacaattctcatgaaagaattggttagaaccgtgatcaagatagtgacgacgacgaaatgacagatgaacaggaaaaccgtcagaattgttctccctaaaaagttgtattcatcccacattgcccatgcggttggcgtaaatcccatcagcatctggaacaaaccataagccaccactttgggggacttgttgtctccaaagtacaagaaagagacaaaaaagccagagcaagaaatgacgatgagtacgaagacggcaatcaggtctgaggccattattcggaaagcaatgaggagttgggagaagtagcgataatgatccaatatagaaaacaacctcgggaatagcaagggagctgtagctgtaagaacatcgaactgagatggattagcatgtgccgataaaagtaccctggtaaacataaaaacgtacggcttgatcggcgatatattcacttctagggtaggtcaggaatgtgccgtatatcctcaagcaataatatgcgaagagcaatagcaaaatcccgacgtcgaacagattccagaagctcatcagataaagactaaagccttgctcattgaacccaacaacttcatcaagcatgaatccggcactccaaaaccagaataagatctcaagagatgtgatcctgcggctgcgctgttccaaaaccgccaggaacagtcccaagagtactgcaaaggatagggtggaaagaaactgccgatagcgcggcaccctcagccgcgataatttgaacaaagatgcgtcccgggggttgtagatcgtcactgaccgccgaagtatcttattgctggactcggtcgtattatcatcattgggatccattgttgccccataatccaggtttccaccttggttcatgctcatagagcgatggagactgtcggcggccgagtggaagacaaccgtccccgcccagatagcctccaattgttgcacgacgacaggatgggccaagaatcgcttggcctgcgcgcggatagcaacctctaagcatgagacacgggccgcaaccacccgtttccgatgagggccagtgactaatattgtggattgatcctggccctgaagtggatagaactcgtaggacagcgcatcgatcaattcgcgggtcgagtattcccgcaatagctttatcgccaacagttcactgaccattgcccgtgtctgatttgccccgctattccccggacttaggtgtatttctctctcgaattgcagacagttggccatcaatgcatagagggtcgcgcgcgaaaagtgggccgacatgattttctgcaggatcggcttgatcaggaactgggagacctgcggcgagcgtagttggtcccatgtgagggtggtttcgcagcgtgaagcgatcaaaggacgaatggcgtgggtgatgttgtaaacaggcagcgcatctaatcatgttggtcaattgtccgtatacaccgtacctcaaggatctccgtacccaaatgcgacgcagagaacataggcaatagaggtgtagactcgagtggtccgtcctcttcctcttccccttcctcccagtcctggtccatatcttcctcatcgatttcgtgaagctctggcgcatcatcgctgctttcatcggctcgagggacgcgtcgcgagttgttgtgtgtggagcgaaaccacggggagggggttgagaatggggactgctcgacctgcccgcgctggcgctttggacgcagcagcgaggcgaacatggcgaggaaacttcaaggtctaaatcagcataaccgaagttgtttgttgggaggttgtaggatgctagagcattccggaaaagagcgcgcgagaaaactaaagagggaaaagggcaggagaccaaagtaagaaggtgaaggtttgctcaagcccaggtgaaagcggaactaactccaaagatatcgtatgtaccttttggtgttagagggaaatctaagttcttactatggccaaccccccacgtcattgtgctgataaccccggttcactccttgtaagcttatttgttcttcggtgtttaccctttcatacatagatcttagatcttagatctttaaatgtttaaatgtttaaatgtttaatctttggactgtccaatattatatcagccttcagttttaagggagatcgcttattatcttggccgtaatcttgattccacagtatgcagaggatgtacatccagagcctgcatatacagatgcaacagaattcgacaggtcagaaatactcgccacacatgtaacagaagggatgaccggcattgtactacacatttttgagacgagacagcaagatgtcttatatatatatctaaggtttttctgctccgtatactccgtaaacatgtgaatacccgactgccccaatatacgatatcgttatcggcccactgcccgtgcattgcatcatatgcagtaacgcgtgcatgtagatagagaatcactaatcccccaaacttctcaattgaaccgtataccataaaaaaagagtactacaatagcacaatgctctctatagaaaccagagcaacggaaaatctctgcggtgaaacggattgtccgaaagcagaaaaagagtggggctagaaaaagctttttgcatgaaaatattttctgccgaacttgctttttctctcttcctcctccacagctggttgcagcaaacagtttcttgtctttccttctttatatatctatactcccttctgcggtcctttctttccttgcaagccaaacaaacaaaatttcacagatgaactagagtgacctgctcgcacgagatcgcactagatcgtccccgagaggacttgttccctcacaccaattacgatgtctcccaattcccttgaggatccaactctgcctaccagcccacacctgggtagtgtagtcggatacccagaggcccagtccaacatggattccgtcagtggagtgatcaagccggcctccatcccaattcggggtggctcagaccggttggtcgccctcgaactcgcagatggtactgtctaccaaggttacaactttggtgctgaaaagagtgcctcgggtgaattggtcttccagactggtatggtcggttatcccgagtctatcaccgacccttcataccgtggccagatcctggtcatcactttcccgctcgtgggtaactacggtgtcccttcgcacgatgagatgtgtgagctcctgaaggacttgcccaagcacttcgagtccagtcagattcacatttcggccttggtggtggcatcctacgccggtgaggattactcgcacttcttggccaagtcctccctgggcgattggctcaagtccgagggcattccggctatgcacggtgtcgacactcgtgctttgactaagcgccttcgtgagaccggtagcatgctgggtcgcatgttgctgcaaaagtctggctcccctcctgatgttgctgctactagcggtgtcgactggaagtcacacttcgaggagactgaatgggtggatcccaacacaaagaacctcgtcgctgagggtgagtgatctaccaagcttctacatgaaaaagtaaaggttttctgacatcattttttattcttacagtctcgattcgcgaacctcgcctattcacaccccccgccaatgtcgccctcaaacacccctcgggccgtggagtccgcgtcctttgcttggatgtcggtatgaagtacaaccagctgcgttgtttgcttgcccgcggtgtcgaggttctggttgtgccatgggactatgatttccccacccttgctggaaaggacttcgacggtctcttcgtgtccaacggtcctggtgatcccgcgacccttactgttaccattaagaacctgaccaagatgttcgaggatgctcgtactcccgtcttcggtatctgtctgggtcaccagttgattgctcgtgctgtcggcgctcagactaccaagatgaagttcggtaaccgtggtcacaacatcccctgcacaagcatgctctctggcaagtgccacattacttcccagaaccatggttttgctgtggatgccagcagccttcataacggatgggaagagctgttcgtcaacgccaatgacggcagcaacgagggtattcgtcacaccagccgtcccttcttcagtgttcaattccatcccgagagcacacccggcccccgggataccgagtacctgtttgatgtgttcatcaacaccatccagtctaccattgactcccccgaggctctcaacatgcctgtctccttccccggtggcaccaaggccgataatctcctggccgcccccaaagtctcggtcaagaaggttctggttcttggctccggtggtcttagcattggtcaggctggagagttcgattactctggcagtcaagccatcaaggccttgaaggaagagggtatctacaccattttgatcaaccccaatattgccaccattcagacctccaagggtctggctgacaaggtttacttcctgcccgtcaacgccgagttcgtccgcaaggtgatcaagcacgagcgtcctgatgccatctacgtcactttcggtggccagactgccctttccgtgggtatccagcttaaggacgagttcgaagaactcggcgtcaaggtcctcggtacccctattgatactatcatcactactgaggatcgtgagctgtttgctcgcagcatggattccatcaacgagaagtgcgccaagtctgcctctgcttccaccctcgaggagtccctgcgtgtggttgaggacattggtttccccgtcattgttcgtgccgcctacgctcttggtggacttggcagtggtttcgcggaggacatggatcagctgaaggagctctgcactaaggctttggccgtcagcccccaggtgctgattgagcgcagtatgaagggctggaaggagattgaatacgaggttgttcgtgatgcccaggacaactgcatcactgtctgcaacatggagaacttcgatccccttggtattcacactggtgactccattgtcgttgctccttcccagaccctctcagacgaagactacaacatgctacgaaccaccgcagtcaacgtcattcgtcacctcggtgttgtcggtgaatgtaacattcagtatgccctcaaccccttctcgagggagtactgtatcattgaagtcaacgctcgtctgtctcggtcctccgccctggcctctaaggctaccggataccctcttgctttcattgctgccaagttgggtcttggtatccccctgaatgagattaagaattcggtcacccagtccacttgcgcctgcttcgagccatcgctcgactactgcgtggttaagattcctcgttgggatctgaagaagtttacccgtgtgtctactcagcttggttcttccatgaagagtgtcggtgaagttatgagcattggccgaaccttcgaggaagctattcagaaggctattcgctcggttgatttccacaacgttggtttcaatgagtccgatgccctcatgtccatcaagggcgagctccagactccctccgaccagcgtctgtttgccattgccaatgccatggccgccggttacactgttgatgacatctggaaactcaccaacattgacaagtggttcctcagccgactcaagggcctcagcgacttcggcaagtccatgtccaccttcaatgctaccactgtgcctgtgcctatgatccgacaggccaagcagcttggtttctccgatcgtcagctcgccaacttcttggactccaacgagcttgctgtgcgccgcatgcgtgttgaggctggtatcacacctatcgtcaagcagattgatactgttgccgccgaattcccagccgtgaccaactacctatacctcacctataatgcttctcagcatgacctgacgttcgacgatcacggtatcatggttctgggttctggtgtctaccgtatcggttcctctgtcgaattcgattggtgttccgtgcgtaccattcgtacgctccgcgagcagggctacaagactatcatggtcaactacaacccggagaccgttagtaccgattacgatgaggccgaccgcctttacttcgagaacatcaacctggagactgttctggacatttaccagctggagacttccagcggtgtgatcatgtccatgggtggtcagaccccgaacaacatcgctctgcctcttcaccgcctcaatgtcaacatcctgggtacttcccccgagatgattgatggtgctgagaaccgttacaagttctcccgcatgttggatcgtatcgaagttgatcagcccgcttggaaggagctgactagcattgacgaggcccgcgatttctgtgacaaggtcggctaccccgtgctggtccgtccttcatacgtgctctctggtgctgccatgaacactgtgtattccgagcacgatctggccagctatttgaaccaggctgtcgatgtttcgcgtgagcaccctgtggttatcactaagtatatcgaaaacgccaaggagattgagatggacgctgttgcccgtaacggtgttatggttggccacttcatctccgagcacgttgaaaatgctggtgttcactctggtgacgctactctgatcctacctccccaggatttgagcccggagaccgtgcgtcgcattgaggaggctacccggaagatcggtaatgctctgaacgttactggcccttacaacattcagttcattgccaaggataatgacatcaaggtcattgagtgtaacgttcgtgcctcgcgatcgttccccttcgtgtccaaggtcatgggtgttgacctcatcgagatggccaccaaggccatgatgggaattccattccaggagtacccccctgtgtcaattcctaaggactacgtcggtgttaaggtcccccagttctcgttctcacgtctgtccggtgccgaccccgtcctgggtgtcgagatggcctctactggtgaggttgcctcgttcggtcgtgacaagtacgaggcctacctgaaggctctgttgtccactggattccgtcttccccgccgcaacattctgttctccattggttcctacaaggagaagcttgagatgctaccctcgatcaagaagctccacaatcttgattacaacctgttcgccactgctggtaccgctgatttccttaaggagaacggcgtgcctgtcaagtaccttgagcatcttccggaccacgaggaggagcagatgaagtctgagtactctctcacccagcacttgtccaacaacctcatcgatctgtacatcaacttgccgtccaacaaccgcttccgccgccctgccaactacatgtccaagggttaccgtactcgtcgtatggctgttgactaccagactcctctggtcaccaacgtgaagaatgcgaagatcttgatcgaggctattgctcgccacttccctctgaacatcatccccgccgactaccagactagccaccgcactgtggtcctccccggtttgatcaatattgctgcgttcgtcccgaaccttgtctccgttggttccaaggacttcgaagctgtttccaaggcttcgatttcaggtggtttcagcatgatccgtgtgatgcctgtcggtgttcacagctcggtcacatcggcccgcgacctcaagattgtccagcagaacgctctgggcaagtcgctctgcgacttcaacatctctgttgctgccactgccaccaactcagaccagatcatccagatgactggtgaggttggctctctcttcgtacccttcaaccacttgtcgggtaacatcaacaaggtggccactgtcaccaaccacttcagctcctggccctcaagcaaacccctgatcacggatgccaagagcaatgatctcgcctcgattctgttgttggccagcctccacagccgtaacattcacgtcatgagtgttacctccaaggaggatatcagccttattgctctgagcaaggagaagggcctgaaggtgacctgcgatgttgctatctactgccttttcctttcccgcgaggatttcccgacctgcagcttcctgcccaccgccgaggaccagcaggctctatgggaccatatgagcaccatcgatatcttctctattggcagcattcccttccagcttgctggcaagcaggctactcccgagtccggcatcgctgaggctattcctctgctgttcaccgctgtcgccgagggccgcctgaccattgaggacatcaccgctcgtctctatgagaaccccaagaagatcttcgagctgcacgaccaggccgatagctcgctcgaggtcgaggttgaccgcccctacgttttccagaatccccaagcctggtctccgttcaacggcaagacgttgcgtggctccgttcagcgtgttgttttccagggcaagaccacctgcctcgatggcgagatcaccaaggatgccatcaagggtaccgacatgtccactcaccgtatcgtccctacctcgcctgtgctgaagcccgtgacccccatggttcgcccggagagttcccttgacaaacacgggtctatcggtggtactcctggccgccgcttccgggccctgtccagcgctgtcggcgaacttggtcctcctctttacgtcgcctcctcgcaggtctcaccctcgctggctgatatgctctcccgatctgctttccggggaaagcacatcctgtctgtgaaccagttctctcgcgccgacttgcacctgctgttcaccgtcgctcaggagatgcgtcttggagtccagcgccacggtgttcttgacctcctgaagggccgtgttttgaccaccctcttctacgagccctccacgcgcacctcggcctctttcgacgccgccatgcagcgcctcggtggacgtaccattgccatctccactcagcactcttctacccagaagggtgagtctctccaggacaccatccgcactctcggctgctacggtgacgctgttgttctgcgccaccccgactcgaccagcaccgagatcgcggccaaatactcccaggtccccgtcatcaacggtggcaacggtgcccttgagcaccccacccaggccttcttagacttgttcaccatccgcgaggagttgggcactgtcaccgggttgaccatcaccttcactggtgatctcaagtacggccgccccgtgcactccctcatcaagctgctccagttctacgatgtccgcatccagcttgttgcccccaaggctctcgctctccccgacgatgtccgccagcagatcgttgcttccggccagttggtcctcgagtctgaggagctcactcctgagattgtcgccagctccgacatactgtactccactcgtgtgcagaaggagcgcttcgtcgacattcttgagtacgagcgtctcaagaacacctttatcatcgacaacgctctgctcaagcacgccaagagccacatggttgtcatgcatcccctccctcgcaatgccgagatctctgaggaagtcgacttcgaccagcgggctgcttacttccgccaggtatgtttctgaatttcccttgctgtctctgaacaatgaactaattgcattatagatgcgctacggcctctactgccgcatggctctccttgctctcgtcttggcgccatgaatatgatactcttttgccattctaattatgtgggaaaggaggatcccaaaagcgccatggatttacgtgagacgttttgttttccttgttgtttgaaaagttatgtttttcgatactccgtaatcagcgtgataaatcgctgtatagattagatgaatctccgtttcatttgacggtcccgttcagtgtatgtctctatttctatgtgtgtatgttatgtgatatgtgtcatatgtgtgttatgcgttatgtgtgttgtgtgtgtgtcgtgttttcctttttggggtcatttgggattctttcggggtcatttcggggatttcggggattcttttgggacttggcgtcttttttgcattttatatacccactctgacaatatacttcattaattcatctgagcccgaactttttttcaagtttggaacacccagcgaggatccttatccccttggaactctccctccgcatcacccacgtctcccatcaacgggctcagttcccggacttccctcagacgctccttttcagcattttcccgtcggagaacgtgccataggatcccaacaaccacaatgttggcaactagatatcccaaggcaaatccatgacccaggaagtaccgcggggcactctcagcgcggtaaagctgtgttccaaggaccgcacccagattcccaattgagatctgcatggcgttggcaatgcaacgcttagtctggccggacacattattggcgggccaggacagcacaatagccacagctgggtaaatgcctgccgcagcgaagatagttccaacgtaagacacgccagcccggtgctgtgacagcaggagaatgtatccgatacatccaacggcagatgatcccatgataaacggggcgcgactgcgagtcttctcagaagcaatcgcaacaccaatagttgagaagaacgacactgcgtacggtggaacggacagtagctgcgcctttgcggctgagtatccgagttctttgatgatggtcggaaggaaaagtgataaagtatacagtggcaaggacattgtgtggaagccaagtccatatagccagactttggggtctttgaaggcatcctgtactgccgaccaggtgaattcctcatcccgagtggcatcgctgtcgttcttcagacgcaattggatgaactcccgttcttcttttgatagaaactcggctgttgatgggtagttgtatacccagaaataggcgatgatcgaagcaacaatggtcaacagtccttcctaaattgattgtcagctatgatagtgcatggtatagttgatcgggacgcaccaagatgaaaatccacctccaaccattcaagtttcctacacctttcatgtgagagattgcctagaaacccattagcttggttatctaccaggagaagaaaaccaacccaagccaggataccaccaaaggcacctgccatcgaggcagagctgaaaaacagagccacgcgataatgttgctcgttccgcttataccacatggacagataaaacaccacaccggggaacaatccgctctctgcaacacccaggaagaatcgcgaagacagatatccagagtaattctgtactactcctagaagtgtagctactactccccagaccagggtgagagtcggaagccatattctcggggtggttttcttcaagacgatctgaatgtagctgttagtctttgtacaggacatttatattcataggcgttactcacattgcaaggaatctcaaaaataacatagccgataaagtacagagtcaggcctgtaaggtactggtctcctgctatattccagttaatcctcggatcaatatgaagacacacaaaacgtacacattttgatgtcggtcgtcattccttctagacgggcatttcccacattgctgcgatccaaaaaggagagcaaatagagtaatgtgaggggtggcaaaagacgatagtccaatttccgtaacaaggccttctcgttgatgcccttgatacttggagaatcgctggcgtccatctcggcgccagtgcgcacatcgtccttttctgaagtagccatagtaactcacgggggactcagtcttgaattgaggcttggattaaggctatcatatatggagagagggggataggagaaatatataacatttagcacaccatccattaccccgccaataaatcattcttccatagagagagcgaataaggtcaccgatataggtgatatcaaaagagaatgagcaacattggggctggaatgacgagagctgattccatgtgaagatcggcaagatgcatgaatagcgtattctacgagtcctatgttacaccgtgaagtatagaggtcgtataagcggccatctgttcttattcttacttactacaaatccatggaaatttctcaggaggttgatatgacgatcagagtacttcatactgtaagaaattacttcaaagaaggcggatgaaatgtactatattgtttagttggatctttgtatttctcatgtctatgctcagtctatagtggtactcccagaatgtatgttcgctaattgacacacctggccatgtcttacccttcatccgtcagctcatgccttatccggccagtacttctgtacaatgaccttcttattgaccttgcccatggcattgcgctcgattccatccacaaccttcaaaacagttgggattttataaggagccatctcgttcttgagcgcagcgcgtagagtaggaagatccagcggtgtagtctatgtcactgttagttatgcaaaaagaacagttgcccttcatggactcaacgaaaacgtaccccttctcggaacttgacaactgcagcaactcgttgcccccattcctggtcggccaatccgactatagcaacttcttgaatcgcatgaatggccagcatcttgcgctcaacttccaacgccgaaatcttatatccaccggatttgattaagtcgacagaagcacggccttgaatgaagtatgcgccgcttgaatcgcgtttagcgacatcgccggtcttgaaccatccatccactgtgaattccgaggccgtcgcttccggcttccgccagtattcgtagaagacattaccgcccttgatctcgatcatgccgtcctcatccacttcgtccacaatacgaccggtttctttttcggtcagtcgcacctcgacaccaggcaatggccatcccacactgccatcgattcgcttttcaatctccagcccacagctgatcgccatgccaatctcggtcattccatatcgctccaatagaacctgaccagtgatctccgcgaatttttctttgatgggggtgggtagggccgcagatccactgacgaccagtcgtagagcacgagctccagcccgcgcggcatcttcttgttccgtgccgcggatatgagcatcgaagtagtcattcagacgggagtaaatggtcggcacagccatgaacaaggttgaggagccagcgtcctgccaccgctcccagatcaccttcggatcgaattttggatgcatctccactgtggtaccactcaggaaactggcagccaggccattgacgatgccgtggacgtggtggagtggcagcacgtgaatgagacggtctgagggagagtactcccaggccttgaccagacagctcgcttggaatgtgatattcccgtgtgttgtcacgcagcccttggggtttgatgtggttccagaggtatagatcatcagggcgcgtcgagtgagctcaaacggcggggagaaagaaggtaaggtcggggcctcatttcgagagaatggctccagtcccataaagggtatatcagtggtgcatccttcgcgtagtaatggtgcgatcttctcaaattccgggtgcacgataatcaatgaggggtccgaatcaccgatggtgtataacagttccttcactgggtgacttgtgcctagcgaatgtcagcgtcgaatagaagatgttgcgcattgctgccatcgctttcacctacaaagtgggacgcagacacctcccgcggcccacacggcccattgtgtcgcaacgtagtcatatccattggggaccaagaaggcaatgcgtcgttcttccaaatcgtccgtcaatctcaattgctcaattatgcgcttcctcaatgctgctgcatcagctagtaattgaacgaaagtgaaggattgttgtttggtagcatcaacgaccgcgatcttgtccggatcttgtcgtgcatgttgctccgccgcagcaaagaggggtagcaaagggatgggcataattaatttgattcttggacactttgactctaaagatgaatcattcaatataagtctaataatctggaggggtaaagtcgaagaatttgagggacatacggaatcccccagggctgtatttagccgattgcggagaaaacgccatgtccaccatggacgggtgggcggcacccggatgattatgtaattatgctcaaaggtcccccgcccctaggtcttggcatactcggtcataagatattccactccgatctcggttcatatatcgcccaccagctatttaaagatgtaaggggaattggtccttcacagcaccttgtgtctgaaagagctggcaatatggccactgtcaatagcccgctactgcaaaatgacatacagcaaagctccttgggtgataccacccagacatcacctgaactcgaccgatcgaagcagcctcgagctaatatatcaaaaatattggctatatttttggctttcttaatgatgggggcaaatgatgcagcatatggcgtaagtacttcgcgaagaatcgaaatgcgatattgctaacacgcaaaagcctctattaccatatgtaagtacctatctaaaaccgtccctatgaacactctaatgaaaagaacagctcgaatcgtactacagcatctcccacacagtggcttcatttcttttcctgtcacctgtctgtggctatgtacttgctgcagttctaaacgacacaattcacactaagctaggtcgtcgtggcgttgcctggatttcctccggtaaccatttcatcggccatctctttgtatctttacatcctccataccctgctctagtcgctcttttcgtccttcagggctttggaaatggcttggcagactcggggtacaacgcctgggtcgccagtatgaccaacgcaaatcaaatactcgggattatgcacgggctgtatggatttggggctgttctaagtccacttgcagcaacgttacttgtgaccaaggctaacttgccatggttttacttttactatcttatggtatgtctttcggtctcggcgaataaaagttggtaactgatcagcagactgcttgcgcaataattgaattgatcttctgcctgggagtatttcgagactcaaccgcagctgctttccgggctgccaatcagaccgaagagcaccaagatgggaatatgagtcgagccatcgctcaacccccatatgcacgcataacttggatctgttcctttttcttccttggttacatgggggttgaagtcgcgctaggtggatggattgttacttatatgagggaagtaagaggtggggaggcatttgccagtggtatgactgccacagggttctggcttggaatcagttgtggcagaatgattcttggcttcgttaccccgctgctaacggaggagtttgccgtcattgtgagttcccctgtgtggtatattacactaaattcatctttccttcaacttgacttgatatcttttacgcgtgtcaggaggctttcatacttactaataattacgcagatctattccctgctttcaattctctgcggtttcattctctggctcgtgcccgtgttctcagtttcagcagtggctgtcacagtcctcggatttttcttaggtccatttttccctgctgcgattgtagtcgccaccaggattcttccccgggctttacatgtgagcgctgtcggcttcgcttcagccattggaggagctggagctgcgattctgccgtttgcagtgggtgctattgcccaaaggagtggtgttcaggttctgccgccaatcatcattgttttgatcatcggcattttgtcattgtggctcttcctcctacaaagcgcaaagaatatcgcacattagttacatctcaatcggcgaaacaatatcgtcggccaagtgccactatcgacgtgatcgcaggatgaacaagacattaggagagtgacacgcgaaacaagggtttttggagcagcgggggatagcgcatgttaggtccgtctgcctcggtattagggtggaaaagaataatttgttttgtctagacataataacaaaacaaatttcaaaccgaggtcgctaattcaacattcgctattactttaataaactaaagtatggctaccgcggatggtgcctgtgccagttcgcccggttggacggtgcgaggcccgtcaaacgatccttcgccattttcttccagcccacgggccaccaagtctgtgaaatcgacacccacttccaccaagagagcggcatggtcgtgcacaatgtcgaggcatttctgccagaccgatgtgccacgctgaacgctgctaagctgtcggctgagcagagcattgaacccgtccaggtgatgtttagcccaacgaatgcaagagctgctcattaccacagggaagcattgttggtagataccgatcgtgttcttgatcagggtaaaatagacataggagatctggaagatgtaaagaggtagatcaccttcaaagatacaggcactaggaaaagaagttagtatgcaaacataagcttgtgtggtggaggacgaagaacataccggatgcgttggccaatcacgtccgaacgtgccttcaggtaggtctcacgtgcctggtcttcaaaccctaaccgtgtcaaccaggtaacgtgagtcttggtagccaccgggaatgagtgtttgtcgaccagtgcccgggagagaatgccagcaagccgagtcgctcgcccatcgaccttgaaattgatgacgtcttgtgcaatgctgttgcccttgagacccttggccatttttcttagtcgctcgatgctgtacacagacgcctcaaatcgctggagcgcaatatctatatcaagttcgtccacctgcccttcaacccagcggagattctgctgtttcccgtccacatcaatgcgcaggtcaggcttgtctcttggagtatcagagaggtcaaaagactcgggcttttgcgaatgggaaaggtgccgaccagccagatatccgtatgcttcgaagggcttgctggccgcttcggtttccgagcgcatggttcgacgtaggtcctcgactgttttgcggaatgttgccagtagttcctgtttcgctgcaacgtcgtcatggcgatatgtaaagggcttgtttcccacacggatactgatcgatctcccaatgcctcgctctaaagcctcttcgcgcgcttggcccgttcccaaattggctccaagatcaatcatatcaacatcattaagaagccagcaatcttctgccactagcctcgtcggaacaggtcctcggtggttggggttgctttggtcgacccgcttacgcttcttcgcagccacgagcaggtaatcgttcaataacacaatgtgaacgggccgttttggtttccatgtggctgagtccagctcaacccaattacctgtttctaggacaatgtgccgtcctggtgcagctggaagccacttttgcgacccttccactgtcttccacaacgtttgcagctgcacgctccacatgctctcaaggttggcgaccgagctccgattcgcatttcgtttggggaaagactcctccatcggtgacatgggattaggtgagtttcctacgcttgtttgtccgagcgccgttgttagttccgccatgagggtacggagagtccgcatttcatccttgagcttctccgcctctttactgattttgataaattgtgtgcgattctgatagacattttgttgtagatcggtggatgttcggttcttgactttgcgtaggctttcttggtacttttggatgtcttcctcggacgcgttggcgagaagactggccacatctaatatcggaaactcctggttagcttgaacaagcacacagcggcggccagggagctctaacatcgatcgactggaagactgggatctcgtagagcatgcaggtcgactttcggtgctggtgaattcgggtccgatggtgatggtagtctcggaatagatgccggtgctaatccgccatgtcctccgggcatctgatttggaagcgtcggaacaggaggaacattgccatcagattcaggtgcgccattgaatcgactcgagtatcgccgtttcactaaatccgaggtcgcatcgttctgaggtgcccgctcacgtgtggggattgcggatgggcctgcatcgggagacctggtattgggaggtagaggaccggatatgggcttaggagcactgatctgagggcgctgccgacgagtcttgctcctcagagtcaatcctcggccttccatggtgatttcacttagcaatgcagcaataatcaaggaatggagtcgtctcgggaggtcaaggggatgacgctcgggctgtgggtatgattatataatccatgggctccggacatctggacatcctcgaaacatttttatcacccaactaccactcaaccactatcgcctctcaaagtcccatacattgccaggctgagaaaatccgatacgtttaattagatatcatcccacattttcgctatggctttccgaaacaccgccatcgtcgccggcacacttctgacgggagttctcggtatgtagcattcgtctcgccgcgtttttcaattattaaccctttataccagcctacgccgtttatttcgattacaagcgtcaaagcgatcctaacttccgcaaatcgctgaagaagaacaacaagaaggtcgcacaaaccgcgaagcaggaagccgaggccggcgccgcagctagggccgcagagctcaagaatgcgctcgaacaagtgaagaggaacggtgaacttccaacggatctcgaagaaaaagaaagcttctttatgagccaagtcgcattgggcgaatctctttgtgcctcggaaggtaaattgaatccattttctcatcctatctccatatcgaacgatgggatggagatatcggttacacgtcgcaatcggaatcaacaggtcgctaaatacatctccaggctcccaagtcgaagcagccattgccttctggaaagcattgaaggtctacccccagcctcaggtaagtacaagccattgcggatgtcacatattgccttcatcgtcctcttcatcattctaactgctgtaattactcaggatttgatcggaatttacgacaagaccgttcccagagaaaccctcgaaattctcgccgagcttatcgcacttgatggtggtcaatctgctggccccaagactggcaccgacgacaacatcgaatagacaactggacctgaccgcccctcaacaacttgtattttagacagatggaattctcaaatttgtatgacataatttatatcgcggagaactagtacgttcgttacccaagagccgtgggggaagcggataaagaggtgtggatgaaggctactatgtaagttggacggattgatggcgatctattgccaaacattccaattagatggagcaaaagagataccaccaatctaaagctacctctcgattttggcttctgtcctatgaagtagtataggtatttttattttctttctatgagacatctatagactggtcgattgttagaactactccataacatcctctctttcactacaaaaccttccaccatcaatcatagaaagttaatcttacagtaatatggctgtgagtactgcgtacattgaaaaaaaaaaaataagataatttatggttcttccattttgtgtactccacagcggctatgtaagacgaggaatttccacaggtaagtaatgacatcttatgcaatttctagtccccagttgatatgtggatgtgaattgaaagcaggaagaggaagaggaagaggaagaagaagaagaagaagaagaagaagaagaagaagaagaagaggaagctaagcgaatggatgagtacgagtagtacggagtagaggtcagagagacactggttggataggaggtccggagccaagggggctttccgtccgctatctattgccaagacatatgttgattccaagactttttaactttgaattgttccagttggaaacggtcatagtgggagaggatacatagagtgagagtagtatctaaaggaagagtaaataagaggttatgtatgaagtagatattccaatttaggcaggtggcattggacacccgaaagacaaggccactatttccaagccctaactaactaaccaactaaataactgcggattaattaaccacacttgggcataatctcaccactaactttataaattacagcatcgagacttatttccgtgcctatacccctgagtttggcatttcaatacagcctagattgcccagaggtggtccaagcaatcactattcaaggacatcttggccctgagtgggattcttggccggacttggcccaccaattcgtcttcggaggaaaaggaagggaaatgggaaagaaaatagaaatggacatttaatcgcttggaatacatgaatgtaattaatagtatgccactactaccatagaggactgcatagcaatatatactggatatagtgaaacgaagatgtgaaacctccaaggctctcccaagaccctccaagaccccccaagacccctattatttgttcagggactgcgattctccacaaaattgacactgacgatcaattgggtagctctacagagtagattaaaattatctcaaagccatttaactcctttgattccctttcttcctctttcctttgatttcagtcgttccttccccatttcgcgccgttgcgctgtccctcgttatctcatatcatctcgtatatcccccgcctcaagtcattccctctctagtttattgatttcctatacccacttgatttcacaatgatcgtatgtgcctgtcgcaactctattatgaccaaaagctgacctcttagtcttacactcgtctcttcgcatccgtgtgtgcgctcgccagcgccgcggctgctttaaatccactcgaagtcagcggcaaggactttgttgactccaagaccaaggatcgtttccagattatcggtgttgagtaagacttccttgcctttttcttgcctgtttcttaccccgcacattctacagtggctgacccctcaatagttaccagcccggtggtgaatctggtttcactacgaagcttgatcctctgagcgatgcagatgtctgcctgcgcgatgctgccctcatgcagcgcctgggtgtaagtctggaccccgtcttccttgccagacagcaacttatctccataggtcaacaccatccgtgtgtacaacctggaaccctctctcaaccacgacaagtgcgcgtcaatcttcaacgctgccggtatctacatgattcttgatgtcagcaaccccctgcccggtggttatctagaccgcagtgccccttggaccacatacagtgccatctactacaagcaggtgttcggtgttatcgagggcttcaagaactacgacaacgtcctgggcttcttcgctggcaacgaggtgattaatgaggatgccacttacatggctcccaagtatgtccgtgcgatcgttcgtgatatgaaggactacattgccaagaactctaagcgcgccatccccgttggatactccgctgccgatattcgtaacatcttgatggacactattcactacttcgagtgtgatctcaagaattcgacctcttcccgtgccgacttcttcggcctcaactcctactcttggtgcggtgactcctcctacaagaccagcggcttcgatgtcctaaccgaggacttcaccaacgccactatccccgttttcttctccgagtacggctgtaacgatgtcaagccccgtatcttcaccgaagtccaggccctctacggcgtggagatgacccaggctttctctggtggtctcgtttacgaatggacccaggagaataatctctacggcctggtcaagatcaacgactccaagaccgtgaccactcttatcgactatgacaacttccagaaacagctcaacaagctggatattgaccgcatcatgtcaagcaacgccacacaaaccagtgttaaggccgagacgtgcagtacctcacttatccagcgcaagtccttttacaacgcctgggatttgcccgaggtcccttccaaggtctcggactacattaagaacggcctgcccgatgcccccgttggcaagttggtttcggtctccgctaccaccattccccagaaggtgtatgactacaccggcaaagagattaccaatgtcaagtttgaggtgaagagcggtgccaacaccccatcttcttcctcggcttccagtacctccgattcttcctctagctccggtacttccaccgccaccaatggtgcctctcctaatggcgccccctcacttgcccttggtggtgcaggaggcttcttcatactgcttgcatcccttctgtaattgccttgatgatttgtaattatttcattcttgggtttcacagttcagacgacatgaccaagaggctgctatcggtctcgaggatctattttctgtatggcttatcctattttattctttgcccagctttcttgtgattcagttgttattctttacatagttccttcggaatgattcgtgtctttgctttttctttcgtgtcttcaaactttcagcaacaagccatcgcatgtacattgggaaggagttagagacaaaatgcaccatagcaaaaaatccttccactttctgctagtgcagttgtcattaacattgttatttatcccacattttatcaacatcacagcttagaagaaggatcgtcatttatcgtagctccaatggccgcccattgatcgaagcctttagccctagttctcaagacttgcttcaacatcttggtaattccgtttggatcgttgctggcaaattaaggaatgactttgcagcgtggcctgtcattttgcgcttcactaggtttcttctgttgaaaagagatagcagggtttcactggcaaagactacttaccttaaaactcggcttgctcagtaccataacatgagtcagaatgtctcgattgatataaatgcaaagacttgagaatattaagcaataacacgaaacacaaaaatcaaaatgaaaattgcaacataactcaagagattctaaatggccctcgctttccctttgcccttgcctgacgatgatgagacaggcgttggccctggcgagagcgatggaaattcctcccactccttctcaccatcctcgcgactcttgccctcagccaagctgagctgaatcgcaaactctaaatcatccatctcttgctgtctactgctctccggctcctctgctccaggggatggctgtcgaggtgggcgtactcccttggcatacttgatagggatagacgatgtttgttgctcatcaagcaggctaaggcgaattgcttcggcaagttcatcgtcaacatcatcgtccgcgggatcttgataaggagacgaagaggatgaaatcccgccagggccaaatgaactaggaccagcagtgtcgaatgaagcgctcgtggccgagctggagaccgcggcgctgtccctaggtttcgccgcatcgccagagcaggcttcctcgctcagaagttgggcatacaacaaaagctgttcctcgtcgatatccggaccaagaagatcaattccaaaacgcgcactcagatgtgctcgttctttctcatcggcaatcctttgacgctccatatccacgcgttcgtcgtggataaagtcctcgattgcaccccgaccactgttgttaaagcgctggccttcgccagccccgttgctgccacgcattaagtggcgaaggcgtcgcttgttgcttttgtattgatcagcttcggaagagctgtaagaccagtatcgcaagtgggtgccaagtgagaccattccacgcagaacagttgggtctgtatcaaggcagatagcgcctgcggcatagtaattgtttccaacacctaagaaagacgactcagcctgcacaagccgacggcgggcccgcgttgaaaaacgcgagttgatcgttcgcattggcttggtagacgatgctaatggatcccaggcttgtacgaggccatcattaccgccatgaacaaggtacaaagatgtgatggccaaggaagatacctggggggagtcggtttggattgtgcgcaatgtggagatggagttgattatctccccagacttcgccgccggggctcggatgtcccaaacaaaaaccatcccagtgcgagttccaacagctaggtatcgagcgcgttggccgggaatttctagacccgaccgcggcagatccatatgtggtaacattggggaggatgcggcagacgacatagagctcctagacatggccagaagaggatcctcttcggctgtgagagtggcgaaagtggacgtatccaacgcactactgctcacctccgtcgacttgcgatcgtcaaaaacaaaatccgacagacgccacgtgaagttggtcgaaggcaatgccgtaagccctgaggaccgagaggagggaaaactgctggtggcagtcgggcttgttatgtccactgggccgccgaaaagtgacggtggaacttccactgtacccgataaggtccctggcatggccgatgagccaaggacaggcctaggagcagtgcgcatgaaacgccggatcgacgcttttgtatcatcgcccgagccggtagcgatgataatgattgactcgcctgccccgcacccgtcatcgccagcaaagtccaccttaagatcgcgttgcatatcccagctttcgcagaccttgcggaagtgtttgggtttcaaagaaaagaaattctcaatctccttcgtttcagcggcaacctggtgctcattgagacccatggaatccgacgatgatcgcggactgtagcttccatcgaccaactcaggattgaaagggtctgggcgtgccacacgtctgcttgcttcaaccatctcccaatgcacacttctaccagtcttccaagccacctcgtcaagctgctcgatgttgagtttggctgtgagtgggatctcaggtgctcgaggaagttctgtgaggtagaatatttcccctagggcattgagagcaacagcccaaattcggtttcctgaatggcgctgggctgaatagtgatcatccaccgcaatggaaatgataggaacaccagggcacaggacccatctagcagtcacttgacctaggtcataccgtctttcgtaagttggatgagggcctatagaatacgcggtcaacacgcctgaagacgatccagacatcatccccaccagcccctgagtgatcttgaggatctgaggggatttggcaatccacactgaacagatggcatgtgtgatcatgtttatggcaggtatgccgagtggtgggtgagaacccaaattcgaagctcccacaaaacgaccatgctgctccgtttttgagatgaaatagctacgcccttggggacagccctcaccatagatcatgccatatggttgactgacgtccatcgagttaggcacaccgaccatatcacccgatccgaggccgtattgcgcttcaccaggaaacagatcggcaaagtggcggaacatttggtggtcggtgacaccccaggtgccaacttttacggccgatgggtcactagctgacgcaatcccttgctctgcggctccatggacgaagagagggttgttgtccggcctgaaagaggcatgtatgtgactgatcggaaagagtagctgcgacgtatacgtagctatggcactaccatggcgagcactcgccgtgtgtacagttccatgcttcttggacgggttgaactgcgccggtttgcctctggctaacgagtgcatcaagcgagtacgcaatatgtattcgcttcgccaggaggctagcgcggttagccttgcgaataatcgcctgtccgactgtaggtccaccgcatcggtattacgctgaccatcctcaacggcatggggtccggggaagaatcgtgagaaggcgatcctccaagcatgaggagtggtcaccagcgcatgaaatcgatgggacaccaatgtgatggcggacaaagattggggtggtagatgcgagagaatatgggtgagaacctctgtggagattacggttgtcagtaataattgcgcagcaggtttgcaggacacccaccatttggaaatgtttccaaagatgtttgcgattgttcaatagaagccactaagcaagatccagcattttctgcttgtccgggtggaatgcgagcattttcatgctggctcactcgatcggccgagggcggggcatggcgaccgtcggcctctttcaaggacgcgtcttgtgtcgacatgctcgggacgtccgcatagtctctgatcgcctctcgctcgaggaaatcagagacttgaggttgagtttcgtcgaggtcatgtccatgctgggtgggactaataatgactgggtatgagtcgacgggaggcgtatgttgagacacggcagtaggctctggttgcataaaaaggtcttgacggaaaggtgaagtggtagcgaccgagccagcgagaaagcctgggtcagtcgagttaggaaatgcgggacgaaaaggagttatatgaaagcgaagcgatgttgaagagaaaggatgggagagaagcaaagatgccggaggcgaggcgaagtggccatcccgcacattatgcagatgcgcagcgaccgcagcgtcctattggcttttacaattcaccgccttcttctccgcctttttccgagtaattcctatacttcaattgttatgtctgactgagattttctatgactagttagatggataactaactactccgtagtagtcaaatactccgtatttggagctcatttgtagtggatttgtcatttatatagaagtagaatagtcagccgcttatatgacctctgtacttggcggtagaggacatgaataatttggatgctaaattagttcaagatctgtttaaatgaattttctaatgtcatttccaatggcttttgagtgtgtttgttgtgtctcttctagtgtcctttccggtgtcttttgatatcagtcgcaaattatccgattttctgctggcaataaaagcgtcggtatgcgatatgcggctctgttcgactttggatattactttagctatgcgagatggagaagaaaagctattatcttactttgagtgtaatactatcttatcaactgttgtcataatcttgttaaaaaattttcaaatatttttcctttaccttctctcaggaatatttatactgaatggccactatccaagacgcgctcagcacgtgacgacgcgacagaagccaaaccaacgagccctcaggtatcatcgactatctcagtacaacttggttgtgaggttgatatgatccccctggaataacttattgatccactgtatcttctcgagttattttcttctggtgccgcatgaaccccagtatcccgcataaacgccagagctgggtgagacacgtgaattcggtagactaagatgcctggagcaaatggtaagacattcccgatactgaatctatattcagcttactgatctccgtacagaggctgaaactattcgaattctcatctccaccgataatcatgtcggttacaacgagcgagatcccatccgtggggacgacagctggaagagcttccacgaaataatgtgtttggccaaggaacgggacgtcgatatgattctcctggctggagacttgttccatgagaataagccgtcgcgaaaatccatgtaccaggtcatgcggtcgattcgcatgaactgtttcggagacaagccgtgtgagctggagatgctcagcgatgcaagtgagaatttccagggggcattcaatcatgtcaactacgaggacctggatatcaacgtggcgattcctatcttctccatccacgggaatcacgacgacccctcgggagagggtcatctggccgcactagatttactgcaagtgtccggccttctcaactactacggccggactccggagtcagataacatccaaatcaagcctgtcttgctacagaaaggccggacaaagcttgcgctatacggaatgagtaacgttcgagacgagcgactgttccgtacctttcgcgatggcaaggttaaattcttccaaccgtctgtgcagaaaagtgactggttcaatttgatgtctgtgcatcagaaccatcatgcccatacagaaactagttacctaccagagaactttctgcccgaatttcttgatttggtcgtctggggtcacgaacatgaatgcctgattgatcctaggctcaatccagagactaaatttcatgttatgcaaccaggatcctctgtcgcaacatccttggtacccggggaggctgttccaaagcaagtctctattttgagcataacgggccgagaatttaaaaacgaacctatccgattgaagacggtgcgaccatttgtgatgcgggaaattatattatccgaagaaaaaagagcccaaaagcttgcgcgcaaggagaataaccgcacagaagtaactcggttcctcatgtccattgttgaagagctgattgaagaagccaatgcagaatggctagagatgcaaggggaccgcatcgatgaggatgaggatggcacatcggaggctccgcttcctctcgttcgcctccgcgtggaaacttctacgcctgaaggaggtagctacgattgtgaaaacccacagcgattttccaatcgcttcattggtaaggtcgctaacgtgaacgatgtggtgcaattctaccgcaagaaaaaagctgcttctacttcgcgcaaagatgataaatctgttgatgaatctaccatttctcatctatcagctcttgacactgtgcaagtcgaacagctagtgcgcgagtttctctcatcacagtcattaagcatcctgccgcagaattctttcggagatgctgttgcccaattcattgacaaggatgataagcatgcaatggagatgttcgtcaatgaatccctcgagagccaggtcaaacacctgttggccttggatcgtgaggaggacgagatggatgacgaggagagagaacaaagctcgctagtgactgctatggagaaatatcgcagtcagatggaaaccatgttttcaaagggcgtgaagaagcgaactcgcggaaagaagcgcttcaagcccaagccagatggttgggattccgagtttgatggcgtgtgggaagatcagcctggtgcacttattcattctgacaacgaaggtggggatccagcagaggaagaggctggagaagatgggacagtgcccgctcgtggtcgtgccgcggctcccactcggggtcgtggtaggggtcgtggtcgaggtgcagcggccagtgcgcgaaccaccaagaccaaagctattccagaaaaaacgaccacgaagggtcgcagaaagcaagccatctcagacgaagaatcagacgtgattatactggatgatgatgacgacgatgttatagccgatgtcatttccgatgatgatgatgatgattcgcaggcactgttcgttaagcagcctcgatctactactaccgcgaagccacgaaaagctgcccctgcgaaaactacgacccagcgtcgcggtggacatgctgctgcctcgccagctccatcatcggttaccgttggcgggactgcttctcggcgagcccctgcgcgtggtaagacagctcagtctacgctcaacttctccgcttcccaggccagcgcacctcagtcatcacgacctagccgctccacccgtaacatgagtgtcatcagcgatggtattgatgacgatgacgatgacgatgacgcctttgaagaaatgccgaccaactcgaggcgtcgtaagtaatttgcgatttaccgccatggatgtttcctttatgcatgtatggagttatcaagaatcactcgagcgttaccatcagcgttgttgccttcaatccttcaatgatatcctcaaaatacggttctcaaatgtcagatgatacaataaattataatcaatcaacaagagacagtacttgaagttgtgacctttggagatgaagtataccgacaagctagtctcaacacggtaattagcttaaatcgcaggaacttgggctcttgtccctaccgctcagacccagaggcttcgataagccaatgaccgaacgagatcacttttggggggcagaatgtgattcagattcccccttacttcgtcaaacacaccagagacaacgtagatctctttgtcatttgttctatcaaccccgcattcccagccgaggggcacaaccacctcggtgcaacacaagctcaatcctctattgcatcatatattatcctacctctgtgttcaaggatacaagacaatactggttaacgcacaatggcatacaaaggtcgacccgttcgcattgcaggttagtttacttgcactcatgatgtactccagctaacctgttaggtgcctcgggctctgcctcagaccggcggcaagctatcgctgattttgcacgtcaccacccgaccgatcctatcgatgtcatcattgccgatttcatgagcgagttcaacatggccactgccgccggtcggcgtgtggaccagacgacttcccgagtaccaacagccccggcctacgagccctcttttctagaagcacttgagccggctctggatgatctggccaagtatggaatcaagctcgcggtcaatgctggagtgactgacaccaagggtctctacgaggtggtgctgcgtatggttgaggcaaagaatctggacttgaaggtcagtcggcgccttacccaaaattaatcaacaattgctgatttgggtgtgcaggttgcatgggtttccggagatgaagtactatctaccgtccagaaggaattggcttccgggtctgaatttcgcaacgtctacacaggcgatcggttggcagattggccattcgagccaatatatgcccagtgctatcttggcggcctcgggatcgcgggtgcactcgcaggtggtgcggacattgtattatgtgggcgggtctcggatgcttcacctgttatcggagctgcttactggtatcatggctggcagcgtgacgagcttgacaaactggcgaatgcgttcgtggcaggccatctgattgagtgtagcaattatgtctgcggtggcaatttcacaggcttcaaagccttagaatacgcagacggggatggctggaccaatatcggatatcccatcgccgagatatctgccgaaggtgacgttgtgatcaccaagcaggcgcatgccaccggtggtgcggtaaccgtcgatacttgtacatcccaattgctctatgagatacaaggaccttggtactacaactctgatgtcactgcggtcctcgataatatacgctttttgcagtgcggcgtcaatcgtgtcgctgttcatggggtccattgcggccctcctccgcccaccaccaaggttggcatcactgcgcgaggagggttccaggctgaggtatggtggtttctcaccggtctggatatcgaagccaaagctcgcatgctggaggcacaagtccggcacttgttgtcaccctattcgggcagatatacgtcactcaatttcgatttactgggctcttccctctccgacccacccaaccagaaccgcgctaccgtgccgttgcgcatcgtcgcacaggcacgacatgcagaggaccttgcaccgacacgcttcctcaaacatatcaccgataacatcatgcagggctatcctggtgctacctttcacttagatatgcgccaaggattcccacgtgccattttcgagtactatgtcaccttgctgccacaatcagcagtccaacaccgcgtccatatgccctggaagccgacggtatctgcgcagaccctggatatttcgcctccggcaaacactaggatatatccatcacgccaaccctcgcagccgaccgcgcgcaccgacagacccgtcgaccttgcccgagactttgagccgacgagtcgcggcccgctaggctggatcgttcatgcacgctctggagataagggtaccgacgctaactgcggcttctgggtgcgtcacagtgacgaatacgaatggctgcaggcgttgctgtctgttgataaggtgcaagagctgttaggagagactgcccgcgagaacacgaacttggagattgagcgcttcgagctacctcgtcttcatgccgtgcatttcctgtttcgcaatctactagaccggggcgttggtgtgaccaccaccgtcgatttcctgggaaagaatgtggcggaatatctgcgggctaggcatattgatctccctgtgcgattcttgaaccggggaaagctatagaatggagttcgctgtctcattcacgggcgactaagtatgccaccggggcataaccatcgttggttaatattgccgatccatgaccaggagacttggatttacataggataaaggcgctatcccatcgtgtacggagtatcttcggggacaccgaaggacagataacatagtggaaatcaaattgatcaataaatactcaagaatgagaacaaatatccccaaacaccgtgctatcaattgcttctgtcaaactaggtagtagggaggtcttaatccagatcagatgcagttgaacgctggggttcatctatatcattgaggtcttgatgctgggaaggccctagaaagaataatccagccagacagagcccagaaaatgcggccaagccatagtatgggagcccaaaccaaatccctctgagcttcataccctgcgaaaaaagctatgccaatgtcgacccggcaaacatagacccgaatgtttcaaagatcccaatcatcgcattcatcttcgacttatcatgtgctcccatgtagctcatagctgttgatcgacatatcgcattcaagcccgcgcctgatgtctgaagtattaatccgaaaatcacaaggccaatgcgcggagcccctgtaagaaaactcccaaaaatcaccaagcaagccgaggcgcgtccaagaattgacagctggccgcaagtattttgaaagtagctttgatatcccagggaataagacaagtaaaatgagcgaacttgaatcatcgcacttcctcccgacaagaagaagatacataaggataagagaaaagtcgcaaggcgcggtttctggacaggggacggagtgaagctggactccaacagcggggcgttctcgttccccctgtcatgattctctatacgcatggtttatcgaaataaaagaaagccaccaagtggctatgaaaattcaatttgaaaggtttggaaaaggtaagtacaacattttggaaactgttgccattgaaggggcgacagggccttggcgatgacaactttcgcgtttcaaattacgacattgcgataaagaagcacccagaccagagcactatgttgtagattttagtcctaattagagatatcatctattctgctgtctcaaagactcatttgactgcaaggctccccgggtattttgtaacctctggcgtcggatttgttagttatgagagccttaggttgagtctaactgcatcgacgagggtcctttaccactcaaagtaactaacagaggaccatacaccttttaagttgaatgacaagacgttttagccatcttagctatctgcgaactttttctacgacatccaaatatatatatccacgcgatatgacctcctctccgccccttaaactgagtaagttgcgagattattggaacatacacgatacatgcagatgcacctctgtcttgctaggaagcaaatcaatcgtctttttggatgttgcatctcaccagtcaatttcagtctccgcccctgagggccgattgtaacgcgggacccacaagggccgccgcgggccggggacccgcattttggatccgctatctggtatgtacattgtacagtgtacaatgtgcagtaacatcgtacaagaacatgtagagatctcgggagatggcagatcaggtgatctctgaatggtacagttgcaagtcatgtgatcagtattgagaatactgttactatagtaatttacataagctggttgaaggcctaaagtagtttagcagggattgtgtaaaggttgtgtaacccttctctttccctatcacctacacccacttggcatctgctttaccacgaaggaaacgctatttcgtatcaatcgaagatgtcagagagtgcatcagcgaatgtgaaaactagattcctggttttttccgacacacatgggcttgatactccaccaaactttgtctcgcgccattatgcggatgtcgcaattcactgcggagatctcactaccgaatcgaaaatcgatgagtacaaagcttcgatccgtttcctccaagccgtgaacgccccgcttaaacttgtgatcgccggtaatcatgacttcactctggacactccaatgttccagaaaaaggtcgcggaagcccaacccttagatcctcaactagttcaaaaagtctacggcaactatgaagaagctcgagggttattcgagaaagaaacagatatcacttttctagatgaaggtatccattcctttcgcttacaaaatggtgctctattgaatgtttatgctagcccgtacaccccatcacttggggattgggggtttcaatatcaccccgagcgcggacatgactttcgaattgagaatgtcgatgtcgtgatgacacatgggccgccaaagggaattatggattacacacactctggccagcgtgccggctgcccacatcttttcaaggctgtagctcgagcccaacctcgacccctgatgcattgttttggtcatatccacgaaggatggggtgccaagattgttcgatggcgtcagaaagttagcctggagccttctcacttgactgatatcgacaacgaaaagtcagtcctcgtatcccgactctctaccatcaagggtaaagggaaccccacagagtgctctactacaagtaattgctctgaggatcacaatacactgcaacggggctctgaaacactttttatcaacgccgcgattgagggctacgaagatccttcgatacagccaccgtggcttgtcgagctcgagcttccagcagcggcgtgagaacctaaacttaccgtcgcgcttgtagtaatgaattaggcagtgttcttggttcttgtcatgttctattcacaatttgtgctaggtatatggttaatgtcatcgcatggtaagtaattttcactagcccaagggcaattgctccatctaagaatacatttacaaaataatcgacctcccgtcctcctcctgtaataatgagtataataataggcaatccacaacccctaggcgtctcccagctccgcgcatatactctagctcttctacattgagccctggaaggattttccctgcctttaccaactccgacaacagccatcgaaagtctgcaacctcaccatcactcccacgttcagccaccgtcacggccctcaatctcagcaagtccgacatggatgcaacagagccctcgaaaaagggatctgccacgtggatgcgttcgatagcgtctccgatttcgataatgtcgattcggacgcgtattccttgactatcatcgaatataatcttgccgtcgggctcgagagaaaagttgggggcaccgtccatcactctcttagcgatgtcatgaatgacatcgctcggtgcagcaacatccacatcctctgtatagaatacagagtcgtgggcaatgctggcagcgccgccaactagaatgagttgacgacgaagttcaggacggactaggcgggtggctctcatagtggtgcagggatgggggtgcacttcggcatgtttcgaagttacggggcaaaggcagctgggcagggcctctgaatacatttagcacatccattctgttgccacatactgcgcctgcgaagtgatgagcttactggagtatatgcagcggggagctgggaggcccgggggtacagtggattgccttcacctccatgtcagtagaagctcacattgtagtctgatgctcaaactcacggccaaaagatgatatatccaataagcatgtatctatacaatgtccgactttgtggatgtgtataatggcgattatttgataatacaacaagcttgcagcgccaaatactcattttgaccgcagtacttgccattctcacctcattcccagttgtgcctttcttttccctcacttcacataatctttacttgctgcggttaccacctgccttcaccgagcttttgggatgcagtagcttttcaagattaaggaaagagctacgcacattcaccgaaaccgcatactgacatacatgtaaacacaagcagtcaattccaaccactagctatgaacaccaccgagccacagccagcttttcctcttgcttattgcaggtgcttttgcattatcaacgagagcttctgctccgttcctccaatgatatcgaaataactatattgtaccgattgcttaatcaatgggtgtgctccgaattcgccgagaactcaatgaaacaaaacaatacccaatcagcaccatatggcggctagtctatgcatttagaacagagcatcgtgatgaaattataataacaaagtccgtaatatcattttatagaaagactcggtatccagactacgcgctgtatccctagtagtcgccatgcactgcgatatacgggctccgagtatctctgttcgacagtctatcataacaaaatatgctttacgggttaatctcgaaaaagtggagttaccacggataattgatggataattgcattgaacactatgcctttgaaatggcaataggcaagaaaagaaaagccggagatcgctcagggagctagggcagtagccttgatgcgagcctcaaagcaaaatccaaaaggatctcagtacccaccagccagagaaccacccagctttatccgtttcacaacagtctattagattgcaagccgctccaccttggctctaaggtattcgatctgtggagctaggtcaccagcatcgttcgaggtgatggtagccgcgataatcggccgggtcacgccgcatgctcgaccaagagcgtgcttgttaggcagaaaaacgtacgggacgttcttgtcttcgcaaagcacagggacatgcatcaatatcgcgagaggatcggtgtcggcggcgagaacgactatttcagatgtgcctcgactcagggacttcgtgactagacaggcaggcaggcattagctccatagttagctcaaagtattgtgaattgtgaacagacataccttcatttgcgccttttttgacctgcttgtattgcatgccttgctgcaacaagtccaagagttcctgtgtcaaagcaggatccgcgaccggccacgctgggaattggttggattggagaatcaaaatgaaaaacccgacgcagacttacggacacactgtggggacgattccatttttctagagggtcgctgtgcacctcagaaggggagtgagagacaggaaagccaatctcgttggggagattggttggcgaagttggaaacaatgttgagaaagtgagtcgtttgcagagcaagtaggtagagcgcggtatgaaactgcgaagagaagagacgaaagagagggagagacaccacctatgagcactttccttaaacgaaagattgtcggccacgtcaatagatcattatactgtacatcattacccagacatcttgagactcgaatatcaccgaagttatacacggaaaaagagttaactggttatatttttcatggattgaacttgaaaccaaagatctttatatgaattcaatgttcttctaaacataatgacaacgctatgcaaacaacgctctgaaacgaacattggaagtctctatacacttacactggtcatggtagccgagggtaagagaggacgcagaaaggctactgcatcaaatattcacattcctatccgctcacgagaggatcaggcgtaatgttggtggcagtgatagcagcagcctcggctggcgtgatggtgccctcagagggagtatcagtctctttgggcgtattattctctacgttctcattcttaacgggaggctttgtgcccttttcacgcatcgctccactttcaaatgcttcttcgggcagaggacggacatggggctgacagatccaccaaggccttccgtactccgcaatcactgctttagatcccttcaaagtctcatcgggttgtgcttcaaacttctcgggagaggcttcgtactcctgaagtccacctttaatggcctcttcgaggagggccaaggtgtgctcaaaagcggccatgtcgcctggtttcgatgtcgcaagagcatcccgaacgttggtatgggttccaaccattggccgcaagacttggaagagatgaccctgcatgaaaccgaggctggcagagtgacacttcttgcccttctcggccttactccgcttttgctttttcttgagcgggccctcctcgtggccgttattttcggcatcattgatttctgcaaactcatcaactgggtcggatggaagataaagtggcttcctttctggaaccggctgttcgagaacgtatttatagatgatatcaaggtatcttcgcagcacggcgtcaactcggtaaccgccctttccatcccgcccgcgccagtattctctcccttcagtgccggctgggggtggcttgctgaatatggacgggtctgataggtttccttcggcgctcatcacagcgtcggcaccggtcgcctcgagacaggtttcgatgtcaccgtagttaagaatgtttccattggcaaaaattaccgtatccgctggtagattgtctcgtaaatagcggatatagctccagtctgcaactcctgtattgtgacccttttgttcccgtctgcgtccatgcacagtgatgatgctggccccagcggagagaatcatcttagcatactccaaggtcttctccttggtctcctggatacggaatttcaccgtgacaggaatcgggagttcagtgtgcaaccgatgcacaagcttatagatcaagtcccagtcctcctggaggaaagctccgtagtgtccctttttcgcgataccctgcgggcagccaaggttcaagtccacggcgtcgcaatgaggtgccacatgacgggcagcctccaagaactcatctgggttgtttgtgcaaaattgaacgaaaagtggccggtcaattgcgggatttccgtcaagaaacaattcatccttgttctctcctttgcgggtaggttggaaatgtttggcccggacgttctcttgttcgccgaaaagacgtgcgtgaaacattggggtgtatgcgagtaacggtttcgggtcgtttggtggcatgaatgatcgagtaagcatgcgccacgcctttgggaagcattaacgtcggtctgcagatgttgctacttggaaggcggactcacgaattcggatctgtcgaccattggagcaacaacatattttgggctgccaatgctttcataaaacttccttccaaagagcttctccttaggctcacgcgcagccgcagagggctgctcaatgctctttggtgggcttgtttcggaggccatttttgagagattggactgggaaaaatgtctagaaaatcggcccaccaaagagttgaaaggcttgaagatacctatgttgatgcctggaaggaggaaaatgtggttatggtcaacgatcgcctccagtcgcatcacaatggagaaacaacttttgcgaaaagcgccgtatctcagccggaattactatttcccggcttatcttatcgtcgcgggggcgattggaagctgcgaacgcgttgagcttgtggtgtcactggggaaattgactttacatctgatgttttcgacagtaccttggcatattcctttccttctcatacgcctcacaagcaacctgatcaacctcaactgcctaggtgatcccttcaagatcggactcgcttgtggattacataatctgatatgaataccccggcgccagccagagactaaccaaggaagtctcgaagtcttttagtgagaacgggaaccgaaaaatatacattttttgatgcatatatgcgatgctgtgtgaaagggaattaatattgtgaagcgagtgtgttgatacacggaatttgacatagttctttcttgatcgctcactgttctgatctctcgcctgccaacaatggacgcgtcaacaggatcaggaggtaagtccatagtccacataatcttctgtccaagtaactctgacagcgtgctaggtcctctaaatctctgcttgtctgaagatggactatatgccgcccacgtgagtggaaagggcctgattgttcactctgatgtagcttcggaaaataaggaagtgcagatcgcaaggatcaaagagattccacttaaatcacttaaatacttcaacgtggaaagttctcgaacatcagatgatgaggttgtctctcgacgactcctgtctgcaaacgacaacagaatctcggtctggcagttcaccccccttgaaatattggccgagattgaaaacatcgaaccgggctcattagctgttgattttggcgctgatgagaatgaagttctggtgtttcatgcgtggaacactaaactcagtgtccattcattagagaccgggcgcagctcagtcattaaaacaccaaaattcgcccatcacctcggttttggttatcgcccaagaactaggcacctcgccattctgttaaaaccggagacttcagatctactgaccgtccacgagccccggtcctacgagctcgtcaacaggaccgtgctttcaaccattgatgcgcaagggttgaaatggagccccgatgggaaatggattgccatctgggatatcgctagtgcaggcacaaaggtactggtattcacagcggacggtcagcttttcagaacgtattccggaccatctggggtggacgattccttcgatctcggagtaaaacagattgaatggagcccggctcccaataagggcgtttctggaatattggccgtgggaaaggtcaatgggaatattgacttactccggactcgcacagtaagttgttttccaaatatgtgcggcattatttgctaatcctattgtggcagttctcctccgcaacaacactctctcatgtcttccaaactgaccagcaatgtctcaatatctggcgtgagcgatacaccagtgccgcaggggacgctgaatatgccgaggcatcctgctcatctgcattgagcatgagccccgagtcggcagggccaccacggggcgtcttgacaatgaccttcagcccagacggccatctccttgcgactgttgacactgcacggcagaatgtcgtttggatttggtcactagagggcaccccgacacttgtatcagctctcgttcatgaacaacccgttcgacaaattgtatggcacccttcgacaccacaactcttgattaacactattacgaatacattgcctgctattcgatggtggtctccaagcggtcatccattgattgcccgggttcctatccagaggaacgagagtggaaaatatgatgtgagatgggttgcagggacaaatccaaagtcgccgttctggttcagctcaccagaacaacatgttattggatatttgtctacccttgacggtgctgttgaatttgaggtgttgaactcggtgagcagcaaaagtttgtcatgattgagaatgagtgtgtattcgagaggaaaaggggctctcaataagtcaagtgcctctaatcactggaatgaactggttatcggacttgatagtatagaactcacattcggtgctgtcacttagatctgtgatcaaacagaacataggataataccgaggccgcgactttgttataccaagacatagcataaacatggggattctgaggttatatagcctggtcaatcgctagacaaatagaggaccttgtcctgaaaggaactaaataactatttgcactatctagctgtttcacttggtcatggtgcaataccttgtcgtctgagcaatgggcgaaaaatgaagcatatgatttactctggctaacaagtcgacaagttaaaaaaatataacaaaatcaaaagtaaaactccgatagggggaatcgaacccccggctgccgtgtgagagacggcgatgttagccactacaccatatcggatgaggactgcgaattactctcttaggtttagctttgaccttttgggtttagctttgaccttttgggtttagcgctctttgtccgtgtgcgttcccgtgcgtggttctataaagtcctccctatcgccccttcaacttttcgctgtatttctcccgcccgctttttctttctcctcgtcttcgtccgtgctctgcaggtgaggcatttctgctattgatccggatcactgagctcctaacctccgctacccccttatccctcgacttgactcatcggctattctgcgctcgtacgaatgcaatctacgttgcccgccctgtctttctcagctccgaccggtacgctcaagataagaccgcctttacccttatggcgcgacgccgaccggcagacaccgaccggcaggcttaccgcccgggatatcaatcggctgtaattggcttctgtgtaagcaagcgcagtcgccttaactatattcttctataaaagcgtcgcaagactgaacttcgggccaaaacgttcggcagcaagttttttatgattgtggaagcacttttccattattacggtcatcgctagtgaggtctgctgccgatagcgcctagatatcgccttaatgcagttgcccctcagagctctcctacagttcccgatcatctgttgataatatcgtcctgtatcgcgaaatggcaccgaccacgagatcagcggctaggaaggcttttactacgtcgaccttgactcctccagccttgaaaatatcagaggttctagaaatgattctgcttcagataaatatacgtactcttctgacatcttacctacgccgctgggatatgcagtcaacattgggtgggcttcgagtcatctcccgaactagttgtagctttttaaagacacatattagcttgcttaaagacaacagcttcacaaagacaccagcaaccaaggaaaactataagcgagaacatgcacgaaaatcaaggatcatcgaaggtgatcgaattcttcgaatttattcgctcgtcatgctttttttctcaggccaattcatttacaggttcaaacaccatatatggaacctcacgacttccctagaggacctccgagttgcgggtattggtattagctaagaaataacacacattccattctacgagagcttggctatatctgccatagaccagagtgaattcagacgttgggcgactgatggggatgccagaatccgacccgaatcttgttcatttcattcgaatgcaacaggaaatatgcattgtgcgacaaataaggattctcgaggcccaataaccaaatgataaacttaatgaggcccatgtcgtactcatcttggtttgttcgtttcagttttcgttgagctctaacgctcaccatttatcccggcgtacccttgtcatgttcgcagtacattagcaaaatatttctatataatgaatcgtcggacttggatttctatctcctctatttgagaaaccgaatctcattcctatactgcaagtggtccatttatctttttattttctagggaatgtcgcctgattaggtgctttcccagaggccctggcgttagcccccgagttttcagtccctatataatcaactgtccgtcggtcgttcgtaatccgttatcgatgtgcctcccgctctctttatatagtcacctacgcgagagggtctacgaaccgtaaaatacaaagaatggtctgatagggccttgctatggttgagtgatagcgcctgctttgtttacgctatgaccggaatataacgtggcttatttgaccaatcgaactgccctagccgcgagccagaggatgctaagtccgcaaacattgcggcacgaacggctagcccctaatttcgtgatgtcctcatagtacgagctcataggcccagattgcaaatgcgataccgtccatccctcctccaattcttccggcattatgaaaactgctttgccgcggaatattgcttgttggaggccaaaacaacggtatatttcagcttgaacatttcggctgtgcacggttagcactcaggtcgtgctcactaatcacgcaggcggatatccatagataacgactattcctgcaaccgcacaaaacgtgctccgctgccagcttacttcgttgcccagtcacggaaacccctgcatatgtgactgatgcatagtgtggatgatgcctagcctggcgctaatgcaaagtatacacatgtgatggattagtctctgtggcttgagttttataatctacctgtttattcacaatataatttacagcgtatcgagaaatatatttttatcgcatatatagtgaagcggatactgcaaccttagaatactctatacctcgttccctagctttcaagtccaactgctatacaccttcgtaccaactgccaccttatatctgatctctcttcacctgcgcatccatagctggcttatggtgttgctttcaggggggtactaggaagatgccataattttcatacttcaatgttctgatgctcggtatcttgagttattttactaaggtatctagagctttgactccttctatggttctttggataacaaatacagcgtttaattgagtgaatggctctgtctcaagatagtaacttcagaatttcgggcctccatatagggcagcaaaaagaaaagcaagggcaaaggtccagcttcacaaaaactcaattcagtccataaaggccggctcgtctaagtctgagtcagaggcctcctcctcctcttcatcattatcacctggaggttctttgattgacacaatcatggcctgataaatatcctctgccacaatgatcccgctcgtagcctcatcagtcccaggagtgctttcgaaatcctcaaaggttctttcctgcaccaaacagtctggtagcttgtggccggagatacttctcgataatatctttaacatagacttgcagagatattcgccgggtgttggccagaatagtctgatgttttcaactttttcggtaaagttgagattgccttccttcttgcagtgtatgtaggtaataatgaatcgaaaatataagtacctcttagctggccgtgcatcgctaagaaactttaattctcttccgtccaggtcctagagagaggttagctaattgcccaggctcattgaaagaaatattagcttacattccatgtagtgcatgtcgccttggtgctgtcttcggttggaaagcgcttcataactgttgtgtgtcgcattgcttcgtgggctaacacacacttccaacgcgaaggtgtcgtgacatcctcgtcttcgaggataggcacgatgactatcttgccgctatcaagggcttcttcgaccttgtagtgaagtgacagggctggatattaggttagtggtagaatcattatcgcggggggcacaaactcaccattcctcggatcagaagatacaatggcccccaccccaaataggtgagcaatctcatctcctcgaaggctctttggcacaaggtgggctgctttgatcgatttggcatcagtggatccaatcacgtggcagtgtccctcaaattcatccttagggatatcataatataaacaaacgtctctcttgaagttagaggcattgaagcttcgcccatactcatccctctctttcggtaccttcgcgccggcggacatcacctttgggcaaatagttgcggtatatgctctttccagaaattcgacgtcaagttctccttgtcgctgacgcttcacgggcggtagctcttcgagatcatcttgtatggctttgcgttgattcgaaaggaacttcaagtgatcagaagtacgtcgggcggatgtcatgagtggttttaacgcggtgataaattccgaggtggttatcttttcattgtcgaggacttcaagaagaccatcgtgagcacaagagatgtaatcgagatccattcggtagtctcgaatcttgccctccaggaactcggacacagatcttgtggtcgtcatctctctcgcctgcttcctgagaagagcccgctggcgatccagtggcataatagcgaatgcgttacgagggatatctggccgacggaacattttgctgtgtgatgagattcggtgaaactccagaggatgtattggaaccgaagcccaaagagaaagggctgagatagagatgaaattcaaactccaaaggaggttgaataagcgaaccgaggattggatccgaactccaaagagaacgggtgaccgaagtcgaaatagagaaccaatccctaaaggagaatggacaggtgaaccacggattcaagccgatttctaaaggaaaacgagagacagggattgaaacgagaccgatctctaaaggagaacgggaagaagagccaaggatcgaagccgatcttcaaagcagaacggggggcaaagatctaccgtcgctttcagtgttcagggcaaacggcagacggggcttgatgattatgcagttgatagattgtgcggatgaggatttgcttgaaggaaaagtcattcaggggggaagttgacgggtctcatctactcaaaggcggaaggaaccagactgatggtaatccacggtatgtaccttaggtaggtactgtaatagggaaaccgcgccacatcctgatgtgcgccaaaatgtccagaatggtagatttagcccccgatcacatagcatagagcatcaagcgtcctacatctctctcaaaaggattgtctatttcctattccggtcgtacaggggccctgtgtccttcctcatactccccgtcgtgcactgaacatccccgtcgtcttgtctgcgatgtcagaccgccgtcgcgctcttcctacttcactaggtaggtctcggcattcacgatttcccgaacgtttcctggcaaatagaaagtgatcatacttcgacatcgacagatgttctactccgcggctggttcttacggttggaaatctctatctcatacaagtggatctttcctccggcgtgcagcttatcagattatcatcagattatcatagtataccagaatcaagcaaaggaatgaaattaggtatataagaatattctctaaagagcggcaacccctccccccccaaaaaaagaaaacacaatagtacacaagaaaagcaaatattctgtcttcagtatgaggcagattctgtggtgctggaccttttctggggagaaagcgatttgtgggctcggcgaccaaccgacctcaaccattcacgccctctacgttggacctctgggctggcaaaaacgcgctgctggtggaaggcctgggcattttgcatgaactcttggatggcattgatgataccattggtctcatgctcgggcttattggcctccagcaacgctgctaccaaatacttgaaagggcgcatgaagggcgggccctgatcggataggcgggagaaattgaaacagaggttgaatggcaaggctactgccaaccatcgttggtcgaactcggactctgacatcgaggtcttcacctgaaattcaaccccctaggactgccaatcctatatgatgcacatctcgtttctgggcatcggaagctcatatatcgcaataagaaaatcggcgaggagtgccgcctcctacctgaaacgaatcatggagtagatcttagcctcggactcggggaatatgcctaactggtagaatctgaaaagagtacctccctaagccacctctcggcctcgattccaatcccctcgataagtggcatggaacatcctcgccatctccttgattctgtactgcgcaatgagagcggttatgttctcgatgatctcgctgttcctagttgtgcggactccgccgactttgtttgggtcgctgactgtgaatgtggcatttccgggatcttggtttcgaagtgcgcgtatatcttccggcccagtgtacggatagggcttcatttgtttccaccgacactcaaagtgggctagcgggatgccggttcggcccgtccatgagtattcccatctatcatcctgggcactgaatgtgaaacactgcctgttgcctagccgtgtcacgctattttggcatgtatccaggacagattggcagaatgagttatagcttagggtttgctgatcattcggctcctcgggttgtaaactcagctggtcactagaattgctagattctcgagcatctaacagaggactcgtagcactcgaaagggtctggaacagggtgctcgcaaaaattgacccacaagtccgaccgacacttagtgaagcaccccacgcattagaaagtcctttgtgaagttcttcgtccggattagtatggagcccaccagctgctgtcatgctagtaatgtttaattccggagtcgtagcccatcctcccgagtaataagcggtagtaaccagggtaacgcgggcaccgggttcaaggacggctttcagggcgaggatactgagtccctttgattcattgctatcgttcaaacagaggtggtaattggggagtacgtgacaaaatatgaggaggagtggggcgtcggttcgtttagctaagtcggaggctagcattgcctccagaaggaaacggtcaatcatttcattcgaccgaacgacagtcacaggggtcagttgatcttgatccagtatgtcacgatcaaggcaagttttgcgctcctcgtaaggattgctatgtagatatggcccatatttctggatcagcgcttgtcagccacgtctgcttctggccttgacctttgaggagatagttgaaggtgtagaagtcggagataaaccacccgtctcgcaatgggtgggcactgttgatagaagggtgcgttgcggcgaggatgatggtgttctcgtaaacacaaggtaccgttgaagaggtgaatgtttcaggcaggtcacttggggatcgcatatgtcctcctttgacgaggggctgttgctgtgttgagcctgccattgtaaagtgatgtcgaaagatatgcctatggtgaagttaggatcttatcactgagggtttcaaatacccaaattctagcatagcactagccacatcggggctttacttacttttcgagttctaccacccaagtaagaacgggcggcaaccagggaagaaaaccggactccaaaggagaacggcggtagacagggattgagatcgtcaaggagaagaaagactcggcaccatcgatagcttaggtcagctactcctgttggaagtaaaaatacgttataatacaccgtacttagcttagctaagaaggtgtgcacctttttggcgtagcggtcaagtacaggcgttttgttacgttgacaactctagcactggacgtccaccttttttgggacaggaacgataccggttgccactctgcattgaatcctttaaggcttgaagctcttggatcctttggtcatgcccatgaactaccgcgattgccgattcccgcgctaggatctcctgctcgagtgcctcctcgatctcgcagagggtactgggtggtgtgagatcaattgattggctcactgcggtatagctcgaagggggtcgggtcgtgaaactgcatttttttttccttttccctaatggcaattggtacaacccggtatcgagtggtgtagcccgacggcaacgacataggaagtgaaaggcccttgtaatagttcacacgaatcacattccacgttaacaggaatttgagtccccgttgactggaccgccgaaagcttcaattttggcagtcttggtcccgactgtatagtagaagtctgctctgcgtacgtacccctggttcatggtaaggtatgcggctctgtagtgtgtggagcagagtgtctaattattgacgaacctgtctcccacgagtctattggtgctgtagcgcagttcgcgcctaatatgcaggctggtcctggtcatctgtgattagcggggctgggtgtgtgttgggaaatgactccatttggaagggcgaagagtattctttgcggtccggctggataagtgagtaactaaacgcaaatggagatggtgaagaaaggtgtcatgtgtattgaagatcatgtggattgaagagtccaggggaacctcagcaaccttgatcatttcagaacttccgtcacatttcctctcttctcttcccctcttgtctcctagcatccttcaccatcccatccgcagcttttcatccactatccgttggtttttcatcaataattcgtcgccaacctctcttatcctgcaaagtctattggccttttggtctttggttctcctattatagccatatcagcatcatccccgcccgcgagtcaagacatattcaagtgcgatcggatactggaacccgcataagattcatagtgactatccagataacccttgacaaacgggccaatggctaatacgatacaagtttcaaggttcccctgccaagatggcgggacactacactgtaggcgcgccgatgaatgtcctatctgccgaagccggagcataactcattgagcctggtgtatgggcaacatacgcaaagcagcttccctggaaggtggcacggaccggtcaactcctcaaaacgacgcggtcaaattcctcaagaacgcagacaatctccacgagcctatgcaacgttccacgaccaattatacgggtaaacggttggacgagaggatcagttctgaatcctcgaaccttgagtcggtcttggtacagatcgtcggcaccttatctcccccatgaatgccagtcctgtctgaagcgtcacgggccatggggctcactgtatccggtacatggacgccgaggacagaatagggacggtatgtggaaaatgtcagtggaactgtaaagattgtcgatgcaagtcctcccagccccctctcggaggcgagatgtcacaaaaagttcaccgacgaggacgttcctctacatcttccctgggctcgcgacttggcatctcaattcacagcgcgttgttggcgacggaacggaacatcgcattggtgggactccaacacgcaggctgtgcagagcacttgttttggtgtaattcagactttgaagtagcgggaggagtgctttccgcacggcctcaaaggagataatgactggcatgatgccctgccgtcgtagctgtttggaaactagggacatgtgaatgtgtccacggtagcgagttcttctttctcactccatgtatgatgtcccttccttgatggaactatcaatgtgacccattggattgagtttgtaaattaacagagaagataacgaggaaggagcaaaacaagacgtatgataaagaggaggataggagggatggcaggaaagggattaggaaacagattaagaaagaggactagcaagagagactaagagggcaggtgctctctgtgttctcagattgcacctcaagtctgatatcaagtcttcatacgaccgagaactatgcgatgagacgaaagtatgtctaaaacaaagcatgttttaagcttgaatgtcgaggacttgattgagagtaccgagaaccaggagagtgagagctagatataccgtatatacatactacttctagattctgagtacgggctcactcccactcacgacaaccgacgtggaaaatatcatgtctgattagagcatctgatcaaccaaatcaaagaagagagagagaattctggccactctgacgaggcaacgcccatcatctttgaaatacttcagaggtcgttctgacgaagaaagcaaacatgaagggggataagactagaactcttcaatgggctaggttggtcctcgaatataggcccagagcccaactgtcaatgggcttcgggctattttatccatagccagcccagcccgccgcccattgtcaggaacgtctgacatgtgcaaggtcaggtgtagggcagggcagagggacacatagtgcaggtgcagctgcagctgctatacttctcactgctcttcctttcttctcttcttcttcttccttctctagcttagtgttttcgtataaagaacacaaagttcctttttttctatgattgttttgccgagtctaacatcatgttttgctctctttaattttattagctgaaatgctgtgtagacatagatactactgtttatatctctagtattagcctgaactacaaattagaatcaagaaagaagaccctgaattacaaactattataaataattaaagacagacttcgaattctactaatagtataagagtagacctcgacaagtcccatgggactaaaaagattttggtcccaactcctggaccgtgctatatggaaagaccacgattttaatgcttaaaaccacatgaaatcatggcatttccgttgtcaccttgacttacaccatatcggatattggatgaaggaagatatattattggctatatgaaccagcgacggaatagcttcatttttgaactggtctataattcaggcatattaaggcatcaacctgaaaaaccagacatttaccctcggccgctctgccccttcgtagttgaatagatatttgactatcgcgattttattttcgttttcaattttagaattagtgagtttcgattatttgtggggttataccatgtttatgcgatccattacgttgatcttccgtcatccatgttgttggtataaacaggatctcacatcatgccaagattcatacaatataactgtacaaggactccggaatagtgatgtttgaaacttgattcctcggcctagtccggtcattatcagtcagaatgatgatcccgtcatacttctggatttagctttactttatacgcttgtgtgtatatccaaccatataccgataggttttttacgacaaagtaattgaataataatttacaggaccaatcctaatgatcctacgatataagcgacagagacattattattttgctgagcgaagtaaacgcgcttgaccatctcttcagtgcttaggtatcactgtcggggttcttacatcatcgagccctgggaacaagattcggagcatgatttgaaagagagggcagttttagaacgaatattcaatattttccggtttcctggcatggataaacgtcacattgaccggatcgaaatttcatagtctattttataaactcagccgccaatctgaccttcagtttgatctattttctctccacctcccacctctcaatcactgggatattaataacattgcgacctataacaacacgtgaaacacgactttccagcatgcaacaggaagtggaaaagccctctcggggccctcaatctcaattccaaaagggtaagctcatttacaattctgtctcattgtttcgggcttaacaaggaattcaggtcaccaaatccctattgagcaccacaaaaagcccggcttacaggctgagatggaagacccaaatcccacctcaagccaacttccaaccgaggatggcgggtatcagacctacaaagccgcggggaagcttgccggaaaaaaagccattatcacaggtggtgattcaggcatcggtcgtgcagttgctattctattcgctatggagggagcctcgagtctaatcacttaccttcccgaggaagaaagagacgcacaggagactaaaaagcgagtagaggaaattgggcaaagctgttattgctaccccactgaccttcgggataagaagaattgccaagcagtggttgacacagcccttaaaagcttaggtggtatcgacatcctggttaacaacgctgggactcaaacgatgatcgacgatatcaaggatctagaagagcatgtatcttccgtcttatatcattaagtgtttttactaacatacgttcacagatctcaatgggaaaccactttcgacaccaatatccaccctgtcttctatctttcgaaatatacaattcctcatctgaaaagcggctcgaccataatcaactgtgcatcggttaaccactacattggtcgccctgatctactcgactacacgtcaacaaagggcgcaatcgtcgctttcactaggggtttatccaaccagcaagtcaaaaacggcattcgggtgaattgcgtgtgtcctgggccaggtaaatcgaatctcccacagaaatatttccgcaacagctaatctgggtatagtttggacacctcttattccagcaactatgactaccgccgcagaggaggagttcagcggcacaccgatgggtcgcccaggacaacccagtgaggttgccacatgtttcgttttccttgcgagccaggatagtagctttatctctgggcagagtctgcaccccaacgggggagtagttgtcaacggatgaacggtagatagaggctggcgtcaattaatatctgaatttcaatccggagcctcgaacgggcatgacatagttcgtattttggttgcgtgatgtcgtgaagggagatggatcaaaaaaagatattatttatagcatatttcgtttcgataagtaaactagtactagtccgttcagacaaatgatagccccaaaaattctatcatatagcgccgggcatacataagtggctacctcagattagctcaattttattggattctataactgcagtcttgtcgccttacttcacagagactgttggaatgataggcacatcagcacattcgacttgaacaacatgatgctcaaacctcccgtcagaagccccaattacaaccgcacttaattgatggccgtataaacacgccgagtccagtccaattgcatacctgcttagctgcaactggcgctttgcatcatgcccgaatatcaccatagtcttggatgctagcctatcatggcaccggttccattccataacccagctttcttctccgggaatttcagccggtacgaatacatcctcgtcacctgatttacggataaggctccgcatatgcattacagcgtgtggatcctggtcttcaagtgggatgccaggaacgaggccagcatgtacgacaattagagtgtcaccgaagcaggatgttaggacatgaggtagcttgacgcgtaatatcaatggcaaagtggcaagccagtcgagctgacgcgtcgaaagtaccgaggccgtactgtgcgatgtggcaggtacgcatttgtcggcgatctcgaaatctcggatattatttccgggtagctccgcttcgggattttcaggtacgaccggatcgtcagccacgcccctggagtgcagtagagtatcccttgtggcgttgaccttgatctccaccgccgcattgagaactgcattttcgtggttgcctctcacggcgctagcgccaagcttcatggccagatcaacaacaccaggactatcggggcctttattgacgaggtcgccaactagtatcagatgatctcccttgtgtttgtcgaaatcgaccttgtctaagagtgcctcaagggactttctcatcccgtgcacatcgcctacaatgatcaaacgtccactgacagggccattttcggatgatgatgggaggggttgcagaataaggttggtcggtaggtctgaaataaaggttgtgattgggaatatcttgtcggaagatttcgtggtcattattgtagacctgaagcataagaaagaagacagagacattaaggcccgtccacgggtctgtgtgttttatttacataataacccaatatagactagcgtagcttagtgtacatgtcaccaagatatatattcagaacaaattcatagagtcactggagtatgtcggcaacagaggaagtgtttccccacgaagcttggagggaaatgagtcagtttctcctgtgtgaaagaattttcacctccgtggatcacattaattacatgaacctcggtagaagacaagaatataatgaaagagaataagagaatatgttgttaggccataataatatactatggatagtaatgtatggatagaaatctcatgggagaaaaggttagaagaattcccgtcagatcatgagaatggaaatgggaagaggtctggtcctatgggtcccaatttggcgagatccagctacgaataagaagaagggagcttcagttggcaaacaaaagagtgtatggagttagatacatgcatagaagataataattattgcgatacactgagtagtcaaaaaaacaaaaaagacacctttgctcaaatgtaaatctgttcttcgatctagatcaagaacaaacattcacttcgaggaatttgcaaatctatcgaagatagatttagttaccctggggggcgggcttgccatctttgacatccttggggtgcttgccatccttggggggaggggggacctggtcccgcttgccgctgtccttgatgtctttggggtgcttagcatccttgggaggagggggaacttggtcccgcttgccgctgtccttgatgtctttggggtgcttggcgtccttgggaggagggggaacttggtcccgcttgtcattgtcattgtcgccatgagccgggggcagagcaacttcagctgcagtgggctccgggagggggttgccctggacatcggtagggcctgaaaatagtgttaataaaactctcagcctaggaatgggttacatgtgccggtgtacatacgcccattaggaggagcaccggcaacgaggccagcggccatcagagtagcgagaatagaggtgaccttcatattggcagttggagatttgttgtagaaagaaaggattgaaagtgtctttggtttggaagtgtttggaagtgtttggatgagagtgatgatgaatggaagacagtgtccaggaccgcctctttatacctttaaactcgagggaacccccttaatgttttgactgagctcaactttgtcacgacattggaggaaggaataacgatcggattgacgcgtcatggtcgtcaaggctggtctggaatatgattctattaaaaaagccaaaagcgaatactgcagtagcttggcctaggctgcaactacttctggttagacttggatcttgagatccgtagtttgtctctagagctttatgtggcctccttttatggggtccaaagaagggatataacagacctcaggctctggtattatacggtgtatacagagtgcatatagaattactctacgaggccatagtgaatatggaagcttttcataacagagaattgagatcatagaatgtctctgaatcaataatgttaatctcattactccgtactggtcgatgttctaagttgaggtttgagatcgaggatgatcaccatcgggtaagctccccgaagccctaagagaaagaatgaggcaactatggagcaacatggctgatccctagctaatgcgcctatttttaagaattttacatcatccatcttattcaagtttcattggacaatcgaagagctttctccagggctgagatgatgtgttccccacgtacacgcggcctccgcaaatcccagccacgcttcactcctcagtgctccatcgaacttgtcatttcacataccacattgaatttatggttcttcgtagctcaacgtatccgaaaaccatagctcttttaccctcagtttgaagctctgtatgagcaaatccatgagaaaggctacgttgcttgctgtattattcggaagcccctgagcctcatttccatagatggagacggtgagtatgttgacatggctgacagatgttgagatccaaatgcttccccacaggcccggctccattgaaatcgaattagggttgaccaaatttagaactgccgaatttccgaatttccgcttattacgcaatgatcgcccaaaatgatcgccatggctttttctccattgttcagaaccatctgcttccggttagccaatcaaggtccagagattcatggtggggcgggagatcgacgagcttatacgtacacagtttgacgcaattacctatgatgggacgaacgtatgggtaacgcaaaaggggcttgcttagttgactgtcggtgatttacttctgcttctcattcgctccccgtaaatgcttgttttctccaagcattgctgcctaatccatcaccactctagaagtcttgctgttggatgttaagccaaattttctgctaaatcaatgttttgcatgagcgcttctatgtaaaccacaaaaccaattccaaggggtgaacattaattccacaggtttcattgacccggaacgaaaattttgataccatcacgcatatgctcaaaattgcgcaggcaactcttcactctcccctttcaaattcccccttaccgcggtgaacctgggccctcctaaatgtagttctagaccacgtatggtatgcttgcactattggccctagaccttgggacattctcagtcaggaaaaagacttcatccttactccacttaactgaatcgaggctagcaccatgctcagtcctcacattttcgtacaaactaaaagcctacaagtacaaagtcgattttttcgttgttcgtagtgtcaaaatgagtatggctattgtgtcatcgcctatcccacgtcacatcagagtctagtctgacatttttggtagatgatctactaaacatggcacccacatgacccatacccatactcagaaatacacagctctttacatttctctcatgttgccaacatatctttactggatgatgctcctcgagtcttccaagaacggctctcggcaagtttggttatatgacgatctggaaggcgaccgcacctgccctacctgcacctgcctttctgtatctcccagttatggaagtaaccgctcctttcatgaacgtaagcgaaagcaagcgggctaaattcgtcatttgcgtggtttgttgaaagctctcgcacaaaaccatgagatcaggaccgataaatagttttctccttcctttcctttcctttctatacttagtattccgcctgaataaagactttcttcttacaaagcctggtccgtgacaggttacgtttataaaacaaaactcctgtgaaggggcaaggtcatctgcatgtcgtatttcctgccactaataccaaggaggaagtggagaagcttacagagacgattcgtaagtaggcgcaagagctgcttgatatcgaataaacgtggtggtagaatacccactgctgtatggcaggtggaagctcagtaggccgtagcggaagtgaatggaaatcgcgtatgaacctaggaaaacatcacagcttttccaactatctaggaaagtcattatttggtgaagactacgctgctttttagataaatggaaaagaaggcgcaacctttaaattcattgctttggacatgattcccgttcaacgttgaagagataaaaaatatattgttcattcagtaacgaagacataatttctttctattattaagaaccttcactatattccagccgagagacttgtaaattgctctgtattcactcattccgtaaatcaaattctagagttgctatcggcatcgaagatggccactgcatttgcgggaatgaaaggaacatgcagcaagcatgcaacgtgactacaagggcttcaggtttcgagtcggttgtgcaggtcggtaattttataatatagagcgaatttataatattgcttgggaccatgggtttggtaccagcacctcggcacgtagttttgatcaacaacactcacagtttcttcccttcttctgaacattcacatcaataatctagcctgacacagttcaaatgcagtgagcattcccagctgcagcgtaccttttgtgtccacattggcaacaggctaatgaccccacgtaagtttgaaatctctctgtgtagaataagcttcagaagatatatatattccccgacccaccagcatgatcatcgagccccatttgtgacattgtgtagattccatcttgaaaggatctaagtcataaagctatttaaagacactgaatcgaaaaagaacataagataaccacacactctatggtactttttatctctgccttagcgtactttagttattgttggacatagtggtcacctgaccatcagcccggtgcggcaggcaccaacccccataactagatagtcgggcattctgcccctttaggccacattggcaacaggctaatgaccccacgtaagtttgaaatctctctgtgtagaataagcttcagaagatatatatattccccgacccaccagcatgatcatcgagccccatttgtgacattgtgtagattccatcttgaaaggatctaagtcataaagctatttaaagacactgaatcgaaaaagaacataagataaccacacactctatggtactttttatctctgccttagcgtactttagttattgttggacatagtggtcacctgaccatcagcccggtgcggcaggcaccaacccccataactagatagtcgggcattctgccctttaggaattgacaactctctccctctatcattttccatcactacactgtagtcgcatcagttatccatccatggctcacatgaccgcttagtcatcccgctctctgtcgatctcccgaatctctccaaagtccacttcccatccactcaaactcttttcctgtttggacccccatctggatgcttgcagggagataacgcagcagtgcataacgacaaggactatatcgcgccatttcttatcgcgtgaattggtggatgtaacaatgggagacacccctggagattgattacaaatccacctcattaccaatcacttcgaacagcccttgactatgtgtacatttgtagcctttttctctcaaagggagaacttcgagtatcagccttcgatttatccaaaagaataatacccgaagaatttcctcaccaatagaaaccacaccaccaaacacgaaagaatgctccgaccagtcatcttcaggagatgatctcaaagctccgtctcagtcccagtatctagcacaatctcaatcccaatctgaatgtgactgtacagagaaaatacatgcatcggatatgttaccgccaaccgaccccgaaacagggcaacggagccggaagccaaagcccctgtcattctatcttgcatttatagcattgctattgatggtcttcttggtgtccctggatgctaccacgttggccgttgcaatcccggtaattcgataacaactccttcaattcaaacggccattgagttcacctaacccttcctctctataggccatcaccaatgaactttccggcacgactttgaccgcgttttgggccaacatctccttcacagtagcagtcgtggttatccagcccatttataccagtttctcagatatctgcggtcgtaagatccctctttacgcggcttttgcccttttcggtattggatcgattgtcttgccgtcgcgaaaaacatggcagttctgattgtgggacgtgttctacaaggactgggcggaggtggactcgacgtcctaagtgaggtcattgtcgccgatatcactactctgcaagagagggctgtgtatattggattactgtcgcttccaatggcgacagggtgcatcgcgggtcctattctcggtgcagtcttcagtgagtttgttacgtggagatggatcggctggattaatctgcctatagtcggcattgccctctttctagctattttctttatgcgcctaagaccaatcgaccagtcccttcgctcccagcttggccgtattgactggcttggaatgctactatttacggccggttgtgttcttttcgccctaccgctgagttgggcggggaatatgtacccttggggatcgtggcgaacaatcgttccgctgatcattggtgttttgattttggtgggatttgcattttacgagggttatcagactgacgctgtcttcccctaccgtatcttccgctccagaacggcacaaatgtctctgcttggaagtttcatccatggcttcgtgctttatactcttctgcaatatcttccattgtttttccaagcggtctacctcgaatcaccgttgaaatcttctatctcaatcttaccattctgctgtgtggtatttgtctttaccggaattgccgccttcgccgttgacttctttcggagatacatatgggagatttgggctggatgggttttcctcgccgttggctgtggtatcttctcactgtgggatcgatcttcttcagtagccatgactgctggcttccaggtgattgcggggatcggcattggcacaatcttcagcgtccctcccatcccaatgcaagccagcgctgcacccgatgaccagggtctcgcaatgggaataatggtcgcgttcaggctattcggtgcccttattggtcttgcagttggtgccactacattcagcagtgttctcgccaacaggattagcggcatcgatttacctgcttctttggcattgttgaaagacccagtgaggccgtaagcttcattccctatttacgaacagccgatatctctcctgatctgcgggacctcattcgaggttcatataaggacgccatgcagacaatctggtatgaagtggccgcttttggagcattgggtttcttgagctctctattcgtggaggaattgactatggagacggaagagttgggtcggcagcatttcgagcatgagtcagaatgaattgaaatccacttttggaagattagatggtagagcgggtgaacctgaggtggatgtggaaacgggaattgccctgggaagtgtaaccaaaggggcatagcgcgttttatcaaattgtggccttaatgcctgaaattcggcctgagtttcgaccgcttttaggcatctatttacagccggcacggaataaccagtcccgatgaccccgtgaatataaagcttttggcggcatcctttttttcagggcatgaagcaatttaaattaattctagcaccacgaatgagagagataattcaatttcgaaaacggaaatttaatgcaagatggtggattatggctaattgactaaatacgacccgtacggagtacttaatgccagttatggtacggggtagattcatgtggaatggaactctcttcatattgccagatcaggtgatctttgaatagcttcatagagatcttaatatgcaacaccaacagtttgcccagtctttctattatacgaattgcaggaaccgtaatagtcaaaccaagttgacatatagctatgacttccttcgaaacgctcaggtccagtgtcatatccagggatcacaacaccaccattcaatctctattttcgaatcgctgacgagattaccctggggtgggaatgtcgcccctatcatctgccagacaatcgggttgcaaaggcctggaactttgcgttgaatgatctgaggtttccgtacgctaatgattgttttgtgatacttccaagctggctgcccgccgcgtctatctagcctcggctctgaaatagtgggttttaatgactcacaaaaggcatggttagttaggtcagaaatacacatactttcaagaataaaatcttctttgcctattcctatgattcccaggtcttttatgtcagaaatggaggtggtagcggcaaagaattgacccgagccaacttagaggtctagttagataggaaatataaaattcgcatgttttcattgcaataacactggcttcgatcgatggagtgcactatatattttctttcatatcttaaccctttgttctagtctagtatgctcatatctgcatcctccctgccttttttccaattggtgatgatgttctgagtagctacttatttcgcacgtttttcgactagttgaagatcccaagtcgctaccagtgcgtgcgtcgagcgatatctgggccacagcgcgataccatacttcgaggcaaatgatagcgggcaaaacatgcagattcaagtaacgcagcgtctatatgttaagtaaaagtgcccaagttccccacccatgcgtagaaaccggatatgtaccaccttttacgcagatgaagatattttgtattggacttattgacatagtgcataatgcatgacctgtactgtggagtactggaggttgacgacggtctacattgtctatgacgaagtagatccttataagtaagcagcttgatcgacaggatctgcagtttagtgcgctagtcttcagcccagccacgaattccacacactctatccagccgagacacaaggtctagtggcgatatatctactccgaagtagttcataccgcacggaacggaccggctcgagcgggagattcaaaaatatcttccatattgacgtgactgtgcatgacttgctgtatgacccatcatactttcattcgttgtttatgtaggtcgcagtttgtttcgggcaaaccgggatcatcagtgtggttacgactccattagaaggctgatcgattccttatccgtagggtccagaggcaaagcgacttacatgtatagtgtgggtcgctgctgatgaaagccattggcctgagaggagggaagcttcacccattagtgagaggggtattgttggaatcgccagttatgaaaaggaagagtggtataagtatctggttatcccccgacgagttgatggtctgacagacatctcgagaaaggaagaaggacacaaggaaaacaccaatatgaatgaaccacgcaaagaaaacaatccccacaatgtcatcagctcgtacttcatcggacctaaatccgaaaatatgggcaacttccgagccaacattacagcgatcctagatcaaatcgaaaagacacgttctgattaccaacccgatgatgatgtgtgttccaacaccccataatagcacaatgcagatgaaagacgggtatagaaactgacaataacaggtcttaatcaccgaggatgttcgaacctctccggagttccaacaaatcacccaaaatttccatgaagcagtcaagaaagctgtctcactcttgggaaaacattccattccattttggcatcctcgctatgagggtcacatgtgtacggacatgactatgccggggctactgggttatttcatgacgatgatctacaatcccaacaatgtcaccgtggaggctagtccgttcacgaccgtcatcgagctccgggctggaaagcagctatgcgatatgtttggatacaataccgattctaaaaaattggaaatgccgctgtcctggggccatatcacttgcgatggaacagtggctaatttggaatcgatctgggttggtaagcatacctactcactgtgatgccaaagactcggggattgaccaatgtacagctcggaatctgaagttctaccccctcacactctaccaagccatgaaggaaggtagccttggcttcattgctgatagcttctacgtcaccacttgtgtgggagaggagaagcttttcagggatctagggaactgggaacttttgaatcttcgatcggaggtcatcttgagtatgggagatgctctgtatcggcaatatggtatcacgtccaagttcctagagaatgccttgacacctttcagcattcaaaccacagggaaggatgttttggagcgcgaattcaacattaccaagcccaccaagtacttcctggcccagacgagacactactcgtggcctaaaggcggaggtaattcttaacttttctgccctagagtgaccgattactgataaatccctagcgatcgccggaattggttcggccaatatgcagggtgtggagctagacatggacgggcatatctccatcgaagcgctggagcgagagctcgatcgatgtgtgaccgagcgtcaagccgtatacgccgtagtggccatcatcggatccacggaagaaggtgaagtggatccgttgtatgacattttggcaatgagacgtcgatttcaagacaaggggctgtcattcctggtgcacgccgatgcagcctggggcggatactttgccagcatgattccacgattttatatggccccgggaagagcaacgaagaggaaggatggagacaacgccgtcatcaacgttccttcgttgaccctgaaacccgataccgtcaagcatatgattgcactcaaagaggcagactctatcacggttgatccacacaaggcgggttatatcccctaccctgcgggcagtctctgctatcgggacggtcgcatgcgattcttggttacctggactagtccatacctcactcagggatcaatggaaaacatcggcgtatatggtgttgagggaagtaagcccggtgctgctgcgatggctgcatggctctcaaatcagactatcggattggatccaagaggatacgggatgctgttgggcgaagcagcctttaccagtgcacgggtaggattcccctttctgtctgtattacgatccgctttctaacccctgatagctatcggccttctacgcagctatgcacctaaagcaacccaaggaagatggcaaatcctactatgtcatcgttccattcaaccgactgccgatcgagaaagagggatacgacatcctgtcagaagaagcagaccaccaacgtgaacttatttgggaacatgttctgacgaaagataacgccaaagtcagcagcaaccccagtgcgatgaaatggcttcgggaaatcggctcagatctgaacatcaacgcattcgccctaaactggtaccatgccgatgggaccatcaacaccgaccttgaggaagcgaattacctgatgagacgagtagtcaaccgactatcgatcacaaggagtgacaaagaccccagtaaaatccccctcttcttgacctccacgcaattcgagcccgcattatatggcaaatgtgcgcagaacttcatgaaacgactacacctcgagccctgtgcacaagatctctgggttctgcgcaacgttgtaatgagtccgtttccgacagaacgtggcttcattcatcagctgatggagaaactggaggagaccattattgatgaagtcaagaactcatgccgcccgcgaaatagtcctacggcaaatactatcgagttcctattacgaggaacggatgaagtgttcctggagttccagacaaaattccatcgcgcaacccagcgtcaacagatcatcttggcggtggaactacggaaagatgtcaaaagtcaatacatcgcactgcgagaaaaattcccctgtgaagacatcggattcgcgtcgcatggtccgattcatctcgaaagcttaatgcttcaaatcaaggacgcgacccactctcgtccacaaatcgagggtgagatcggcctcgttgaagcaggatactactcacacacgatccgatgcaacgtgacgatgaaccgagtggtgaagagtcggggattgaactccaatttccgagacaatcattacccccgtaacttcatgccattctatctcttcggcacgaaagaacaacaccatatcacgcacatgctcctccaagcgccgaacatcaatctttcatctagtaacatccagctggacaaggagctccatgacaaagtagcgcctcgcctcggagagggagaaggtctcatcctagcgttgaccgattaccgcgaggaaacgatgcacccattcccgcttgataacaatgaccgcgcgatcaatagcaagggattcttcttccgaagaggtcaaaccttcaacgtaaaggtgtatgttgaccccaagctggctacagccaatggacctgggttactggatgaattgtgcacgctggtcggccgtggtaaaatgacactcggggatgatgtgcatgtggacgtgactgtgttgaatgctgatccgtttgaggatgaggagccggatattcagtgggaagaggaattggaccatatcaccaacgtgttgaatagtggccagtagagcgatagattcctgggatgccggaggaattacaattgccaccgtgccatagagtggtcatccacgtctaaatataatatctcttggcgccaaaagcttcatgttcatggggtcgtcgggcccggttattccgtcccggaataatttacgtaaagcgatgctcccagttagttcaggccaactatcaggcattaaggcctcaatcaggcgaaaatgcgcgctattcagcaatgctaattgttactgagcctgtgccagaaacaaaatctacttgcaggccttataaatgtggcgagagctgagccctgtcatgccagaatactcatcgaaaacattagaaattcacgtaaattcatcgatcctcaatctaacctggtatatcccaaatgtaagtctatatccacgggcctgggaaaacctttctatatacaaaacccaaacacctaagccttgagagtatacacaacacgaccacgtgagtctgtacccttgagcacaatctcatcgccagtgctggagacaacacggcgctgatccccattatgtagaacaatatctaaatccttccaagcaggagtaaagccagcctcgtcacgctcaaacttaacaagtaccttctcctcggttgagctgtaggtaatcgtgtatgcagcagtgccgggttggacggagataccatcatcttcataccaagtggtagcaaagacagtaccgtgcgaagttcccttgggcgggaacacttccacaccacggtaatcgtcgacatcttggacggccactgatgcagcggtctcatcaccaggaacacgggtgtgcacgctcttgccgacagggatggcaccgccgacacgggcaatgaggggaatgctcttctgccattccgacgagatcttggcccactgtccagatgcgaggtactggtacggagcgttcatgttgacgtagccatagtcaaagacgctgccggactttcggggcaggtagacgttcgcgacatcgataccggctttgtagacgccaccaacgagcacggtctcaccgaaccagaactgttcctcgcctgacttgagtgcttttgtccacacctcgggatcagactcgtaaccccaaccggtccagcgctgtggcggtgttgcgaatttgtggctctccagaccgagagagtagatgtagggcagcatttcgtaacgacgcttgatggtggcgcggacctgaggtgtgatctcagggtacataaagggctcgatgacatcgccgacgtcagagtccttgggagaagtcttgaagcagttgattgcgaagcggggagcgtggcagcctatttgaatccagcggaggaggagctccggggagggctgggggccttcgaatccaccaatgtcgtgtccttcgcattggagaagggacatgccggcgtttagagacagggcgttggcacccttcatgttttcccagcttgtaacgttgtcgccgctccaggaggatgcggcgtaacggagggttgatttttattatacgatctaagacaaggcgcacctttggcaagtggatcgggctaccttgttcgatgcagtgcagtcctcgttaagggaagccctatctgccagcaacgtgtacaacaacgaatacggacttttaagagatcagtataagcatttttatttcttagagattggagttagaaggataaggccgttttgggaagcatgctgaaaatctgctccgatggagatttgaggcgcacggaaaccaagctctgactctaattgtggctcgtattttggcccccaacctactattcgggtgtggatctagcgcagctcgcactagactccacaatacgcccagcatcaccaggcctcggtcttgagttggcctgtcaatcctgggatggcctgtgctttcagtggttagaattggggtttgcaattgagcaaggtgcatagccaccgtcgctccgaaagttcgctatcttgagggtagatcccaaggaaagaaattgagagcttgaggcataatggaaaaagccaggaacgattgtttcggtctcgcctgaaaaagatctcggtcctcttgtatacctctccgctatcttgcagtcgattgaatactagttaccacataacttgcccgaaggtggagagcaatttccacattatccctatcgaggaaaccgccaactagctgttcgtggaatcacggaaatctggccgctggattagtgtatcacaagatacttgtctcagtctgaactgattttttgcctattgccacttttcgagtgaagagccaaaataacgtagaacataatcgcaaatgcaacagatgaagcgaagttgatatcttacagctgcgtatttcgtataacttcatatctaaatccaatccttcacattcctggccctaacgtaggagtacttattatttcgctggctaaatcctcggaggcttatgctccaattccgggagaggagacttcgatatcaatttattttagtggatatatgctactttcttagcggcattagtttgtcgcttacgctctaccaagaggagaagtcgtggatataaaaggcgttcaagatcctcccaaagctgatgaaaacgtccttcaaaattagagaccctttcctttgagacaagcatatcacttctccctcggcgaatccttcgtccttgttttagtgtacttttcttcatcatgaagcttccaattcccattgctttcgctaccctcttggcctttgcccaagctgctccatcgggccccggagaatctcgcttggaagcacgagcttctgtcaacgactgcggagactcgaccttcataaatcaaagcagtggtggttctccacttgtggctgactgccagcatcttgctaggaatattgctggcggcggcacctggagagtcactgccaccggcggccagcaccagctagctcagtatggcacctgcgcttttggtatccaaggccacaaagacatggatactgcacacgttggcaatcaggacattatcgacctcatcaactcttccatcgccaagttcaactggaacggaaaagtcggtgcgaagggcgatatgttatgtcagggcgagaaggggctcatgggtaagcccaagatgacgtggggtatctatcatacttgagctatagcagtgcgatcgatggcaggtttatttgtaagttgctctgggatctcatgtgtcctatatacggagaattgggcgctaatcacatcttgaaggcatttcatgatcgagacaagcatattattgtgtcacatgcattttcaggccatgccatgctcagttcagtgtacttaaatagtggaaatatcggagggactgtctgattcaatctatcttacgtatattcgaaactgcgccttaccgtagaaatgtggttattacagatcttagacacttgttgcatgttgactgaaatgcggcatagttttatcacgtgtatccaatcttgtcttatttggctgttcatgatattgagtgtggcacaaaaaacataccgctccggaaagctcgtttcggtaatacacccctaacataatcgcgccggctataacgccctttttaccacagtcgcaagaagttgctcgctaaagtcgcccagctcgaaaggttgagagaacaccacccaatcagcacctacttcgaggtgccattaccagccctcgtcgccctcaaaaaagccatgttcaagcttgaaaacatttggaccctatcccacaaagggtgaggtgaatgaaacgtttgaaatcgcgacagctccccgtatttagataaaagattgttagagtagtctatagatacttttccacttagactaaatatcatatctagctattttagggggtttggagaactttgctaatttgatgactgattagggcgatgtaattcccagtaccacaataacgcaagttttcgatttcttcgaaataggtatagtatactaaaaattcttatcgatacctctctgacaataatggattagatcaagttgtggtggttgacgtacaacgctatattctatcgcatttacgatgtgtttcgcagatgtcggtcgcctggagtgggtggcttggcttggctgtcttgggtggcgctgcgggtcaggacgaagggacgcagcttgggctccatgtcctgcagggcatcgtgggaagatttgcccatcaactcggtatggagggcacgaccccaaagaccgacggagttcttgacgtctttcgctgcggcatcggcgacagtgggctcattgagggacatggtccaatcatcgtcgggtagggtgtattcgttgttgtcgttccacataccatcaatgccaaccttttggagactctggacaccgtcgtaccaccacttgaaggcctccgctgaggtgaagtctatgtgggcaccatcgccaccggtggcaccgccagcactccacagacgcatgtatccaggctggttttcggcatccttaaagaagccaccggcatcaacaagcttctggaagtcggggtgagaagccaacaggaaaggcttaatgttggtgagaagtcggataccgtactggtgcattttggcaatccagtcctggggatccgggaagcgttctcggttccatgtaaagacattgcgaaccttgggctcggtctcagcaatggaatagcccgaactcatctggtgagccgagcagggaattccatgttgcttaagcttctccgcaaactccagaagggccaaatgagccttctgcggctcatctagcatggtgtacttgtagccaccggagatatagccgtaggcccagcgggggaccagaatggggaagccaaccaactcggcatacgagcggacaacatccttgatggtcttgccaacaatgtagtattgctcaataccgccatggtcctggcggtacaccttgaagtgtccccagagcccatcgatctcggctcccacagaccacagaccgcggctatgggtggtcgagaagatggccacacatccctctgcagaagccttgatcagaagcgggatgtgcttgtagaggggatccgtattgtatacatcatatccaaaagagtcggtggccgatagttggaattgacgaccagtcaaatccatgggagctgccttctcgccgagtccgacatggaggcattcgcggtcatgaactgaatagttggcgacaccctcgccgtctacaatgtatgatcgcagcggcaaatccttgtgcagaggcttttcggagccggtccatgacagtttgaccacaggggtgtattcccagtctatggaagcagtgacaccggcgacatcgattgttttggaggagggaccctccttggtgaagacattggcgccctggaggttgatctcgggcttggtgacactcggatagggaggaatagggtgctctgtggaggcgaaagtggctcggaatagattgggacgaatagcttcaaaagtgaaatcaaaagcactcttgctctttgtgctgcttcggaggtggacggaagcttcttgatcagtggcttgtggcacttgcgaatagcccttggggcagacttctctttgaggcatgatgaatgtgaaagacaatgcaattgattcggaggaactggagagaataccaggatatgccctgacatagtggtgtatttgaatgctagtcgagctcccctcagtcccatcgtttcatgtaccccacggtggtacgaatgatgcattgtagctgtgtagaatcggaatccggagataatccccgagaagcggagacgcgacggttgagtgggaaaggaagggcaggttccgggattaattttgccgcaaacctccgcatttcccccacaaagaacgtccggggaggccccacattagtttttctctcggctttgcgcaccgaaacccgatattaacgattttcggcacttctcatgactcctcttcctccatcgcccctcccatagaatttgcctcagggaagtgattggataatacatcccgacgtcggccgcgtgtatcgtgtcttgccgtttctctccaggtcaactgaccgcgtggactatacaaatttttatcgccaactatgccaagggctaaaaaggaagaaaactatgttgtacgtggtgtgacacttcgggtttggctctcttctccggggaatgtaatatagttccttccccacggggttgtgcatacaggctgtactacatatatctcaggtttacgtattttgtcttcccctattcagcttgattcattgtctttttatacctacttggtcttttattatttcccaccgtgtctctgcgagtgattagctatgtcgcaggagtcaacttcacaggcaaagaaccagcgggaggagttcgtggagaccattgaccccgagctgtcacaagctgtgcctcctcaaaataatggcacaggaagtcagcccaaaggagatcatgctttgcaacttattgaagaggcagggcactcaaccatcctaacccctgagaacaacgccaaagttcttcgaaagatcgatttgcgtgtgcttcccattctccttggaatctacttccttcagcaactcgataagtcaaccatctcgtacgcctcggtgttcggaatcgttgagaaagcccatctccatggccagcaatactcttggctggggggttcaatctatctggcgcagctggtgttccaacccctggttgcctatgttctggttaaagtgcccctaggaaagtttctggccgtgtcctgcctgctatggggcattgctttaacatgcatgactgcagctacaacttttggagagctgcttgcttgccgaatcttccttggtatctttgaagctggaattggttcgttgtctcctgataatacctagccatccctactaacgatgagctttatcagcacccgcgtttattgcagtcactcaaatgtggtaccggcgtcgtgagcagcctgtgaggttgagttcgtggtatgcgatgaacggaatcgtgaatatggtgagttccctcccatattgtcctcgtgacacttatattaacgctgaaggaaagtttggaagcttgattgcctttggactaggtcacatcaattcctctatatttgcgccttaccaggtgagctataatacataattgcctgtcgaggtattaacatctaacaccgactagatcatcttcctctttttcggcctagttacggttgggttctctgctgttgtcctgtaagttttgaccatgttccccttttcgccgtattatactaagataatcttgcttagtgttttcatgcccgattcccccgtgtccgccaagttcctcggagaggaggacaaacttctatctattgaaagacaacgaatgaatcaacagggtgttgagagccaagagtggaaatgggaccacgcaaaagaagcaatcctcgatcccaagtcatggttctggtttgcgttaatgttctctatttcgtgagtgagctcaaatcgtacaaatcactgcactaagattgctaaccactcatcagtgttccaagtggcggcatcactactttcgggcccttgattatcaaatcctttggcctcagccaatatgatactatgcttttcaacattcccttcggtgcagtgcagcttgtcgccacaatgggaggagcttggctagcaaccatttggaaaatgaagagtccagtcttggcattgctctgtctcccacccatcgcgggttgtgtgatgctattacagattacgcacgacaatgcccacaaagggcctttacttgcaggatactatattgtaagtgttgaattgaaacgaaacatcactgtggaatgaagctaatcgatttcatctagatctctgtgtacccagccatcagtaagcgtttacctcattccgggatttaagcccagctaaccatctctagcacctttaatatactcttggtctgcaggaaacacagcaggagaaacaaaaaaaaaggttacaaccgctatcctgtatgtcgggcagtgcgctggtaatgtatgtaacactgtaagccgtcacatcgggttttcgtgctgacatatgtcttacctaggtccttggaccgaacctatataccacaaatgaagcaccgctttatcgtcgtggtctgctttctaagtaagtttatcaacgcacaagtttttgtgcgtcaaatatctaacgcacgcccagtctcgcgatgttttgtgtcttgataggtctcaccgggtaggttttaaccaacttcgagtgatcattctttctaattacgaattattagggcaaataccacatatctgtacttcctgaacaagcagcatgagaagagacgtgtgtctctcggcaaggacgctaagattgtagaccagtcgatgcaagccattcaagctgtctccgacgatgccaaggaggatttgcctcaacaagcagcaaatgacaatgcctggaaagatctcactgacttgcaaaatgaggactttgtctatgtcttctaaggtggcaagtttaattagtctgtgttatagtgggaacatctgatttcgcattatttgatatagcacctttgtattgattaaatgtaaattggaatataatatgtttataattacagtcaaaagcaagaaccaccaaagtctccttaaattagagcttttcctttgctgaactatttcgttgtgggacctggttgattgtatagccggctcggagaaaaacccgaaccccgcgtttctccaggttttccccttcccgtcaaccccgacaatcatcagtgcgagcagaagacggctggctctacatggctgatcagtctgaatgtagcccgtacagtacggtgatagaggatgaatccttgcaccttattccagcgccaacggggaaaaaacgcattccggtacgtcgctattcggattaggaccccacaacagcggacgaagcctaacaatgcatggcgtttttggtgcatagaaagcctgcagtgcttgtcgacaatcgaaggtcagtgcccaggcctcccgagcctgcatattgtggggttttgactgatcctttcaaggtaaaatgcgacggagagagaccatgtacaaggtggttatattccagatttacatgaagcttaaagcttatcctgataaatcagatgtcaaaaattagaaaagcaatgcgtgttcttcgaaataccgaaagaccccgtctcagagtacgaagtgtcctaaggtgttatcaaccaagactaacatcatccaggcggatcgaaggcgtcgagtccgaagttcaatatctccgaaaacagctagaccagatgcgcgagttgtttcaacagagccgttcacagcccaccccaaagtcccaactaacacactccccaagccacctctgtgataggcaacaggatgtgcctcgcgagagcgcttgtggctctcgttttcctcattcacaggatcaccccgaaggtttattcccacatatacctgtcactggctccgctaggtatacaaattgccaccaataccaaaggtctatgtcggggaccatacaaacgctctctccaaatgagacatcgactcagcctccctacgcgcgcagtcagataattactagaccacccaaaagaaaacggtctgggtttgagattcgagatgagcctattgcggactttattgataaaggcctcatcacgcttgaatgtgctgtttcatacttcaatacgtatgtatgatccgggagttattcggggattaattatgttttactgacttgagagatttcagcttctttgcaggatgtgtatgtatcaacccttattgccatactttaaatcctcatgtttcgtgaattatacaggacaggtatatcccgatcttcgaccctcaatacgacacctttgactcggtccgatctcgaagtagtatccttctcaacgcaatttgtaccattggctgcatggtcgaaactagtgaatgcccacccctggtatattttgtacagtactattgtactaaacagtttcttccaggatctggaggtggttcaatgtccgacgttctccacgccgaactcaagaaatggatcaacgtcataatccagaacaaacaattaaactgccgagaatcaattcaagcaatgctcgtagttgcttgttattccgcagaacgctcactaatcttatcctttgccactcgcatggccctggatctggaattggatgaggcctttgatgaattaacccggcggcttgctcttcagaacgaagatatggcttacgccttgccacatcaaatgtttgaagaggagagagcccttatgtggaatgctcggacgtggttcgggcttttggttctcgagcatatgtaagatgagcttggcttatttttatgggttactaggctaatcatatgcaatgtagattccgacttgacggaggaaaaccacctggcattcggctaaaggggaactcccgccgctgtcgggttttacttagccatccatggtcgactattttggatttacgtttgttctctcaggttgaggtatgtggggtatctaaaacagacttgaagaagtattaatctttcttagttaaatattctcagaggtatgacctttcggtggatttagatgcaatgactaatttaccttctatagccaatgtcggtgatgccctaggaggaaacacatcgctcgatgggcaaagcatcgcggattacgtgcatgatatgaaaatcgagctagatttgtggttcgagtaagttttccagttttaccgtatcctaaaaaacccgctaaccccgggcagtgactggttacgcattatcggtataaaatcagatgaaataatgcgctgaaactttctaacaattcgaagaaggttgtgtcgccgccgccgaagagaagccgtcgctactagtcgcccttcgggtacagaaatgctggaccgaaatgatgcttaactgcaaagcattacgatccatgggtgttgagaacgtagcgtgagtactactctagaagaacatatgcctccatctgttttaacacaaacgtgaagtgccatgtccaccacggaaagaacaatcctcctcacagccaaagcaagtgcacgccgccatcttcgcctcataattgccgatccagacttctacctcgccaaactgaaatatgcaatggattttgtctgggccaagtgcgcgttctccttcctattgcttctcaaattatcccgtctgatccctgagcgcgacgaggagcaccaagagctgctggaacaaggtaaccgactcgtcgatgagctgagtaaagctggagctagtggaactcagtccggtgctgggaatatttatcttcaaatcttgaaggtcagtattgagaagtacgggcgtgcattgatggaggcccagcaacccagctcagatgggcccacggatacgtcgccgttctgggagttgtttgatgcccaagcggatctccaatggtttgtccctgagcagtttgtctccgagtgggactttccggggctcaatttgttctatttccctactgcttggcaggattcccttggggacttttcgttggctatgtaattctataaattaaatcttaacctcacgactgctcaacgtcggatatagttacagaattctatcaatcttgaactatctactgttgctgtagtccttggtattatatatacatgggtttggaagacatattttcatcaaaacaaaagaaaagatctattaccgttccacagaaacagtatactcgacatccttccgaataatcatcctcgtactcacatcgctgccactacgctcactgcccctgtcctcctcggacctcccctccccagaatgcgacggccctgaagcctcacaaacgaccgtcctattctccgttccatcgcccaagtgcggcctctccttgaacaaaccactcacctgacgggagggtcttccctttacattgcccatctcgtaatcccgcgaccgcccagaagcgtaggggtctgtatttacacgtctcctagacccagaaccgtatccatagccgccgctgctactaccaaggtttgagtcgccggccgtgccgtagtgggtactaagggcattcatgaaggggcgcagacagaataccgtgcatgctatcagggcgtagttgaggtggagctgggtgaagactgtgtggctgattgcggtgaaggtggggtttttcacgattgtgtattccttcagtttggcgagatggatggcggagaatactattaatctatcgtttgaattttgttagttccatatattagattgtgggaagtggaagagggacgtacggtagcctcgccgcgaaggacaccataatcacgattttatgtgtgatttgcatctgcagaccccagattagggcgatacagaaggcaaaaagtaatagttcggtcaaaatgtcgagcgcggtgattgcttgccagcgggggaacttgtcatcgttagtatatccgattctacgtctgtatattccgttcgcggtggtttttcaagtagacataccaggttatggcattgctcgccaggtataacccacggcttgtttccctcgcagttcactgcgataagcagtatcgacactataatccccactgtgctaagcccgaacgtcgcccagagaatactcttgtggtgcttgcggggcgtcaggcgcaagtagatggcaatgatgcagcatttggagaggtacagggttatgaggtagaggatgtcggcggcgaggagggactatgctgttagtgtatacaattgaatgggacattgggtaatgcgaacattttgtatgcgatcaacggccttctcggtgagtagcaatatgtccgtcccaaagccgatgctcgcggcgtggaagatgactattgactcgataattgcggatatctattcccgttagccccatttacggaatatgccagtttctttccatgcgtacggtcgctcccaaaaggatgatatcgtctgatccccacggtggactgaggaatgtccgcacatacacccggatcagcagacagaccagcgaaatcactaggcatatggcagcggtaatgataataataccggcatgatgcctgtcgtctattgtctcgaaaggcggtgactggccggggggcactttaatggccattgtggcacgtctttgggcttggaagtttcagcgaggatatcgtctgaaaagaaatacgaaaggacgataaccagcgaccatgatgctgactccgtcgatggtggccacacagctcaggcaacttaagtggagggacctagcaaggatagtaaccttggggctagtagctcgggtaggctcaaaccacttgagctcaagactcggcatcctaacatcattaaggaactagaattctagaaaaccctaatcatgataggggcccaggacggagtagtgtagaggtgatacaaaccattgttttcccgatcaagttagtcgatcttttcgagtctcgagctggaacccgatcgaacgtaacatagattaagtttgattgggttaatttaccagccagccgaagtgtgtagatagtgtcgtatgggggccgaaagccttccacttaagatatctcgaccgagcgggcgctccgccacgttagcaactaataaattaaaataattcgtcatctccaaccggacgggctcggagacttcgtacatactgggaacaaagttcggcgatatggggctgaatgggggccgaaaccttggaacccttccgcttagagtgcccccacctccacctgaatatggaataaattaaaaaacgcatcgagcttatgctcacgacctttttagaacactcacgacgaagtataacatacgttgtaacccaaaggatcaggccatagaaatgcgcgtcccaagcacccaattttccagaatattctctaatcactaaacctaggattccttcgattcctcgtcaattggactccgtacagccctctgaattcgctagtccatatattctagctagacactacgtaggcagttggtgactatctattaagctgatactgagggccgtgctgttaaaatatatcattggcttgagtctgtaaaaaaagtggaaaaaagtggaaaaaagtggaaaaaagtggaaaaaggtcctggttggatcgtgctactatcttgcacgcttgtttcatatccacgaggcacgaggctgccaagtccttccttttccttctctttatcaagtaccacaagaatacataactagtcccgaggtcggccgcgtttgcggctgctgtcgctaagaacggcctgatctagctagctccgtagtagtcttcagtagtctttttagtagtcttttagtacaacatagtctcttttcttgatttagttttctaatagatggcgggaaaagacggcataatttgtgaaactaacttttctacgaagtctgaataacctttgacccagtctctattaaccctggattaactttctctcctaaaatatatccagagtttgggatgtcgtgttgcccaaccactgatacggctgctctcaaatctacgccgttgcatcgaagaatccgctttatcatccgagaatgtagctattgttgtatctctagttattaccctatctaatcacttttcctccctctaatgcaacagttattcaggttggtagcgcctacatctctcgcttcaccagcgccacgggcgggatatagtggtgccgtccccgcaacacataataaaccaccgcgacgataagaatcccaccgtacatcactgcgcaccagttcatggtttctggctccaccgtggaagtgagcgggaagaatgcgaacacgaaaaccgggcagaggaagcacaacgccccgatattaattgccatgccgaaccggccaagcgtccatttgtgcggtgggagaggctctcctctgatacgcttgaggagcacgcatgcaattgttatgatatatgaggacatcattgcgccaatggtcagggtcacaatggcgagtagtgcggttgtggagccgatattgatgagtgacaagaggactgtcactactagcgagaccatcacggaattcaaggggatattccaaccggggtttacctggcgctgttagtattttcaaagctgtagaaagagaataaaccatacatagccgaagaaatcggagaaaggaaggccgcgatcacgcgcgaaagaccacaactggcgcgatgccgttgcgacctctgtaattgtgctcgccgttagagtcagcactagaatagcggtcatggtgttcgttcccggcagactctctgtcgcgttatagaacacctgcatgaacggatatcctgttgggctggccaggatgtcgtcaatgtcccctagtgtgaagcagacagtcaccagcatcaggaagccggaggcggcgttgacgcagacagaggtgatcatcgcctttggcagggtttcagacgcatctttgatctcctccgctgtacaatattagcgaagttcgtcaattcgagagatagacttacacatgtgcactgcacaatcatatccaatcagcgcggtgattgtagtcgagaatccaacgagcgtggcagttcccgcgctgttccaatctccgccgttgttgaattcggtaaacacctccttcgcgctgcggcgagggccaaggacccacagcggaattatgatcgcgaacaggccgcacacatgcagaatcagaatcaatacctccacgaatggcagccgcttggccaggaatgtgttgaatatgatcgaaaacaaggtgatggcgataaccagcagggtgccgtgccaccgctggccttcataatccggatgattcagcactatcaggccttggatgatagttccagccaaatacgcgatcgctacaatggcgcattgccagcctgtagcacatagccagcctacataattagtttagttgagcggaagggatgtaggagaacttaccggtgatgtagctgaggaatttctggcagctaggaggggcaaattccgatacccaatggtattgtccgccggaggtgggcgccctggggggtcagaataattacgagacaagatctcaacgggtagactcacatggatgccatctcggccagactcaggaacaccagaaggaacccagtagcgacgatgaggtacccccagatcagaccggcagttcctccatcggtcagtccttgcgcaagcagcctatacagtcagtcattggtacaattagtaagtgtggatggcatacgtcaaaacaacctcccacgtggcgatcagcgtgcagccaaatcctacaatggagatgtatcggaagttacgctatagggtcagcgaagatgcatcaaccaggataataggaaacgtactcgcaagacttgctctttccctagagcgctcatatcggcctggtcagcctgggtgccgcgccatttgggggcgacatggcctctggacggggcttcgtcggccagagccatggtgactgttgaggtgtctttgtcccagggcatattgacatgtacacagcagagacaatgaagggtcaatacaaaggacaggggtatggtagatcacgtcggtactttgtatgaaagcaaggtgtcaagcattagaatattctccgcccctcgtggaattgaccgggtacatctgtctcatagtggagcagctcgcctccaatagaatccaggtgctggagaaggcattggaattcggtaattt
